(19) United States
(12) Patent Application Publication
(10) Pub. No.: US 2013/0078244 A1
(43) Pub. Date: Mar. 28, 2013

(54) METHODS FOR DETECTING AND REGULATING ALOPECIA AREATA AND GENE COHORTS THEREOF

(71) Applicants: ANGELA M. CHRISTIANO, MAHWAH, NJ (US); Raphael Clynes, West Nyack, NY (US)

(72) Inventors: ANGELA M. CHRISTIANO, MAHWAH, NJ (US); Raphael Clynes, West Nyack, NY (US)

(21) Appl. No.: 13/540,088

(22) Filed: Jul. 2, 2012

Related U.S. Application Data
(63) Continuation-in-part of application No. PCT/US2010/062641, filed on Dec. 31, 2010.
(60) Provisional application No. 61/291,645, filed on Dec. 31, 2009.

(51) Int. Cl. C07K 16/18; C12N 15/113

(52) U.S. Cl. CPC C07K 16/18; C12N 15/113
USPC 424/134.1; 506/2; 506/16; 536/24.33; 530/389.8; 536/24.5; 435/7.21; 514/44 R; 435/7.92; 435/6.12; 514/44 A; 424/172.1

(57) ABSTRACT

The invention provides for methods for controlling hair growth by administering a HLDGC modulating compound to a subject. The invention further provides for a method for screening compounds that bind to and modulate polypeptides encoded by HLDGC genes. The invention also provides methods of detecting the presence of or a predisposition to a hair-loss disorder in a human subject as well as methods of treating such disorders.

[0001] This application is a continuation-in-part of International Application No. PCT/US2010/062641, filed Dec. 31, 2010, which claims priority to U.S. Provisional Application Ser. No. 61/291,645, filed Dec. 31, 2009, the contents of each of which are hereby incorporated by reference in their entireties.

### GOVERNMENT INTERESTS

[0002] This invention was made with government support under RO1 AR56016 awarded by the National Institutes of Health/National Institute of Arthritis and Musculoskeletal and Skin Diseases. The United States Government has certain rights in the invention.

[0003] All patents, patent applications and publications cited herein are hereby incorporated by reference in their entirety. The disclosures of these publications in their entireties are hereby incorporated by reference into this application.

[0004] This patent disclosure contains material that is subject to copyright protection. The copyright owner has no objection to the facsimile reproduction by anyone of the patent document or the patent disclosure as it appears in the U.S. Patent and Trademark Office patent file or records, but otherwise reserves any and all copyright rights.

### BACKGROUND OF THE INVENTION

[0005] Alopecia Areata (AA) is one of the most highly prevalent autoimmune diseases, leading to hair loss due to the collapse of immune privilege of the hair follicle and subsequent autoimmune destruction. AA is a skin disease which leads to hair loss on the scalp and elsewhere. In some severe cases, it can progress to complete loss of hair on the head or body. Although Alopecia Areata is believed to be caused by autoimmunity, the gene level diagnosis and treatment are seldom reported. The genetic basis of AA is largely unknown.

### SUMMARY OF THE INVENTION

[0006] The invention provides methods for controlling hair growth (such as inducing hair growth, or inhibiting hair growth) by administering a HLDGC modulating compound to a subject. The invention further provides for methods for screening compounds that bind to and modulate polypeptides encoded by HLDGC genes. The invention also provides methods of detecting the presence of or a predisposition to a hair-loss disorder in a human subject as well as methods of treating such disorders.

[0007] In one aspect, the invention encompasses a method for detecting the presence of or a predisposition to a hair-loss disorder in a human subject where the method comprises obtaining a biological sample from a human subject; and detecting whether or not there is an alteration in the level of expression of an mRNA or a protein encoded by a HLDGC gene in the subject as compared to the level of expression in a subject not afflicted with a hair-loss disorder. In on embodiment, the detecting comprises determining whether mRNA expression or protein expression of the HLDGC gene is increased or decreased as compared to expression in a normal sample. In another embodiment, the detecting comprises determining in the sample whether expression of at least 2 HLDGC proteins, at least 3 HLDGC proteins, at least 4 HLDGC proteins, at least 5 HLDGC proteins, at least 6 HLDGC proteins, at least 6 HLDGC proteins, at least 7 HLDGC proteins, or at least 8 HLDGC proteins is increased or decreased as compared to expression in a normal sample. In some embodiments, the detecting comprises determining in the sample whether expression of at least 2 HLDGC mRNAs, at least 3 HLDGC mRNAs, at least 4 HLDGC mRNAs, at least 5 HLDGC mRNAs, at least 6 HLDGC mRNAs, at least 6 HLDGC mRNAs, at least 7 HLDGC mRNAs, or at least 8 HLDGC mRNAs is increased or decreased as compared to expression in a normal sample. In one embodiment, an increase in the expression of at least 2 HLDGC genes, at least 3 HLDGC genes, at least 4 HLDGC genes, at least 5 HLDGC genes, at least 6 HLDGC genes, at least 7 HLDGC genes, or at least 8 HLDGC genes indicates a predisposition to or presence of a hair-loss disorder in the subject. In another embodiment, a decrease in the expression of at least 2 HLDGC genes, at least 3 HLDGC genes, at least 4 HLDGC genes, at least 5 HLDGC genes, at least 6 HLDGC genes, at least 7 HLDGC genes, or at least 8 HLDGC genes indicates a predisposition to or presence of a hair-loss disorder in the subject. In one embodiment, the mRNA expression or protein expression level in the subject is about 5-fold increased, about 10-fold increased, about 15-fold increased, about 20-fold increased, about 25-fold increased, about 30-fold increased, about 35-fold increased, about 40-fold increased, about 45-fold increased, about 50-fold increased, about 55-fold increased, about 60-fold increased, about 65-fold increased, about 70-fold increased, about 75-fold increased, about 80-fold increased, about 85-fold increased, about 90-fold increased, about 95-fold increased, or is 100-fold increased, as compared to that in the normal sample. In some embodiments, the he mRNA expression or protein expression level in the subject is at least about 100-fold increased, at least about 200-fold increased, at least about 300-fold increased, at least about 400-fold increased, or is at least about 500-fold increased, as compared to that in the normal sample. In further embodiments, the mRNA expression or protein expression level of the HLDGC gene in the subject is about 5-fold to about 70-fold increased, as compared to that in the normal sample. In other embodiments, the mRNA or protein expression level of the HLDGC gene in the subject is about 5-fold to about 90-fold increased, as compared to that in the normal sample. In one embodiment, the mRNA expression or protein expression level in the subject is about 5-fold decreased, about 10-fold decreased, about 15-fold decreased, about 20-fold decreased, about 25-fold decreased, about 30-fold decreased, about 35-fold decreased, about 40-fold decreased, about 45-fold decreased, about 50-fold decreased, about 55-fold decreased, about 60-fold decreased, about 65-fold decreased, about 70-fold decreased, about 75-fold decreased, about 80-fold decreased, about 85-fold decreased, about 90-fold decreased, about 95-fold decreased, or is 100-fold decreased, as compared to that in the normal sample. In some embodiments, the mRNA expression or protein expression level in the subject is at least about 100-fold decreased, as compared to that in the normal sample. In some embodiments, the mRNA or protein expression level of the HLDGC gene in the subject is about 5-fold to about 70-fold decreased, as compared to that in the normal sample. In yet other embodiments, the mRNA or protein expression level of the HLDGC gene in the subject is about 5-fold to about 90-fold decreased, as compared to that in the normal sample. In further embodiments, the detecting comprises gene sequencing, selective hybridization, selective amplification, gene expression analysis, or a combination thereof. In another embodiment, the hair-loss disorder comprises androgenetic alopecia, alopecia areata, telogen effluvium, alopecia totalis, hypotrichosis, hereditary hypotrichosis simplex, or alopecia universalis. In one embodiment, the HLDGC gene is CTLA-4, IL-2, IL-21, IL-2RA/CD25, IKZF4, a HLA Region residing gene, PTGER4, PRDX5, STX17, NKG2D, ULBP6, ULBP3, HDAC4, CACNA2D3, IL-13, IL-6, CHCHD3, CSMD1, IFNG, IL-26, KIAA0350 (CLEC16A), SOCS1, ANKRD12, or PTPN2. In some embodiments, the HLA Region residing gene is selected from the group consisting of a gene of the HLA Class I Region, a gene of the HLA Class II Region, PTPN22, and AIRE. In another embodiment, the HLA Class I Region gene is HLA-A, HLA-B, HLA-C, HLA-DQB1, HLA-DRB1, MICA, MICB, HLA-G, or NOTCH4. In a further embodiment, the HLA Class II Region gene is HLA-DOB, HLA-DQA1, HLA-DQA2, HLA-DQB2, TAP2, or HLA-DRA.

[0008] In one aspect, the invention encompasses a method for detecting the presence of or a predisposition to a hair-loss disorder in a human subject where the method comprises obtaining a biological sample from a human subject; and detecting the presence of one or more single nucleotide polymorphisms (SNPs) in a chromosome region containing a HLDGC gene in the subject, wherein the SNP is selected from the SNPs listed in Table 2. In one embodiment, the chromosome region comprises region 2q33.2, region 4q27, region 4q31.3, region 5p13.1, region 6q25.1, region 9q31.1, region 10p15.1, region 11q13, region 12813, region 6p21.32, or a combination thereof. In other embodiments, the single nucleotide polymorphism is selected from the group consisting of rs1024161, rs3096851, rs7682241, rs361147, rs10053502, rs9479482, rs2009345, rs10760706, rs4147359, rs3118470, rs694739, rs1701704, rs705708, rs9275572, rs16898264, rs3130320, rs3763312, and rs6910071. In another embodiment, the detecting comprises gene sequencing, selective hybridization, selective amplification, gene expression analysis, or a combination thereof. In a further embodiment, the hair-loss disorder comprises androgenetic alopecia, alopecia areata, telogen effluvium, alopecia totalis, hypotrichosis, hereditary hypotrichosis simplex, or alopecia universalis.

[0009] One aspect of the invention encompasses a cDNA- or oligonucleotide-microarray for diagnosis of a hair-loss disorder, wherein the microarray comprises SEQ ID NOS: 2, 4, 6, 8, 10, 12, 14, 16, 18, 20, 22, 24, or a combination thereof.

[0010] Another aspect of the invention provides for a cDNA- or oligonucleotide-microarray for diagnosis of a hair-loss disorder, wherein the microarray comprises SNPs listed in Table 2.

[0011] An aspect of the invention encompasses a cDNA- or oligonucleotide-microarray for diagnosis of a hair-loss disorder, wherein the microarray comprises SNPs rs1024161, rs3096851, rs7682241, rs361147, rs10053502, rs9479482, rs2009345, rs10760706, rs4147359, rs3118470, rs694739, rs1701704, rs705708, rs9275572, rs16898264, rs3130320, rs3763312, rs6910071, or a combination of SNPs listed herein.

[0012] An aspect of the invention encompasses methods for determining whether a subject exhibits a predisposition to a hair-loss disorder using any one of the microarrays described herein. The methods comprise obtaining a nucleic acid sample from the subject; performing a hybridization to form a double-stranded nucleic acid between the nucleic acid sample and a probe; and detecting the hybridization. In one embodiment, the hybridization is detected radioactively, by fluorescence, or electrically. In another embodiment, the nucleic acid sample comprises DNA or RNA. In a further embodiment, the nucleic acid sample is amplified.

[0013] One aspect of the invention encompasses a diagnostic kit for determining whether a sample from a subject exhibits a predisposition to a hair-loss disorder, the kit comprising a cDNA- or oligonucleotide-microarray described herein.

[0014] An aspect of the invention provides for a diagnostic kit for determining whether a sample from a subject exhibits increased or decreased expression of at least 2 or more HLDGC genes, the kit comprising a nucleic acid primer that specifically hybridizes to one or more HLDGC genes. In one embodiment, the primer comprises a nucleotide sequence selected from the group consisting of SEQ ID NOS: 25-40 in Table 9. In a further embodiment, the HLDGC gene is CTLA-4, IL-2, IL-21, IL-2RA/CD25, IKZF4, a HLA Region residing gene, PTGER4, PRDX5, STX17, NKG2D, ULBP6, ULBP3, HDAC4, CACNA2D3, IL-13, IL-6, CHCHD3, CSMD1, IFNG, IL-26, KIAA0350 (CLEC16A), SOCS1, ANKRD12, or PTPN2. In some embodiments, the HLA Region residing gene is selected from the group consisting of a gene of the HLA Class I Region, a gene of the HLA Class II Region, PTPN22, and AIRE. In other embodiments, the HLA Class I Region gene is HLA-A, HLA-B, HLA-C, HLA-DQB1, HLA-DRB1, MICA, MICB, HLA-G, or NOTCH4. In further embodiments, the HLA Class II Region gene is HLA-DOB, HLA-DQA1, HLA-DQA2, HLA-DQB2, TAP2, or HLA-DRA.

[0015] An aspect of the invention encompasses a diagnostic kit for determining whether a sample from a subject exhibits a predisposition to a hair-loss disorder, the kit comprising a nucleic acid primer that specifically hybridizes to a single nucleotide polymorphism (SNP) in a chromosome region containing a HLDGC gene, wherein the primer will prime a polymerase reaction only when a SNP of Table 2 is present. In one embodiment, the primer comprises a nucleotide sequence selected from the group consisting of SEQ ID NOS: 25-40 in Table 9. In another embodiment, the SNP is selected from the group consisting of rs1024161, rs3096851, rs7682241, rs361147, rs10053502, rs9479482, rs2009345, rs10760706, rs4147359, rs3118470, rs694739, rs1701704, rs705708, rs9275572, rs16898264, rs3130320, rs3763312, and rs6910071. In a further embodiment, the HLDGC gene is CTLA-4, IL-2, IL-21, IL-2RA/CD25, IKZF4, a HLA Region residing gene, PTGER4, PRDX5, STX17, NKG2D, ULBP6, ULBP3, HDAC4, CACNA2D3, IL-13, IL-6, CHCHD3, CSMD1, IFNG, IL-26, KIAA0350 (CLEC16A), SOCS1, ANKRD12, or PTPN2. In some embodiments, the HLA Region residing gene is selected from the group consisting of a gene of the HLA Class I Region, a gene of the HLA Class II Region, PTPN22, and AIRE. In other embodiments, the HLA Class I Region gene is HLA-A, HLA-B, HLA-C, HLA-DQB1, HLA-DRB1, MICA, MICB, HLA-G, or NOTCH4. In further embodiments, the HLA Class II Region gene is HLA-DOB, HLA-DQA1, HLA-DQA2, HLA-DQB2, TAP2, or HLA-DRA.

[0016] An aspect of the encompasses a composition for modulating HLDGC protein expression or activity in a subject wherein the composition comprises an antibody that specifically binds to the HLDGC protein or a fragment thereof; an antisense RNA that specifically inhibits expression of a HLDGC gene that encodes the HLDGC protein; or a siRNA that specifically targets the HLDGC gene encoding the HLDGC protein. In one embodiment, the siRNA comprises a nucleic acid sequence comprising any one sequence of SEQ ID NOS: 41-6152. In another embodiment, the siRNA is directed to ULBP3, ULBP6, or PRDX5. In some embodiments, the antibody is directed to ULBP3, ULBP6, or PRDX5.

[0017] An aspect of the invention provides for a method for inducing hair growth in a subject where the method comprises administering to the subject an effective amount of a HLDGC modulating compound, thereby controlling hair growth in the subject. The effective amount of the composition would result in hair growth in the subject. In one embodiment, the HLDGC gene is CTLA-4, IL-2, IL-21, IL-2RA/CD25, IKZF4, a HLA Region residing gene, PTGER4, PRDX5, STX17, NKG2D, ULBP6, ULBP3, HDAC4, CACNA2D3, IL-13, IL-6, CHCHD3, CSMD1, IFNG, IL-26, KIAA0350 (CLEC16A), SOCS1, ANKRD12, or PTPN2. In another embodiment, the HLA Region residing gene is selected from the group consisting of a gene of the HLA Class I Region, a gene of the HLA Class II Region, PTPN22, and AIRE. In some embodiments, the HLA Class I Region gene is HLA-A, HLA-B, HLA-C, HLA-DQB1, HLA-DRB1, MICA, MICB, HLA-G, and NOTCH4. In other embodiments, the HLA Class II Region gene is HLA-DOB, HLA-DQA1, HLA-DQA2, HLA-DQB2, TAP2, and HLA-DRA. In further embodiments, the modulating compound comprises an antibody that specifically binds to a the HLDGC protein or a fragment thereof; an antisense RNA that specifically inhibits expression of a HLDGC gene that encodes the HLDGC protein; or a siRNA that specifically targets the HLDGC gene encoding the HLDGC protein. In other embodiments, the modulating compound is a functional HLDGC gene that encodes the HLDGC protein, or a functional HLDGC protein. In some embodiments, the subject is afflicted with a hair-loss disorder. In other embodiments, the hair-loss disorder comprises androgenetic alopecia, telogen effluvium, alopecia areata, telogen effluvium, tinea capitis, alopecia totalis, hypotrichosis, hereditary hypotrichosis simplex, or alopecia universalis. In some embodiments, the modulating compound may also inhibit hair growth, thus it can be used for treatment of hair growth disorders, such as hypertrichosis.

[0018] The invention provides for a method for identifying a compound useful for treating alopecia areata or an immune disorder where the method comprises contacting a NKG2D-positive (+) cell with a test agent in vitro in the presence of a NKG2D ligand; and determining whether the test agent altered the cell response to the ligand binding to the NKG2D receptor as compared to an NKG2D+ cell contacted with the NKG2D ligand in the absence of the test agent, thereby identifying a compound useful for treating alopecia areata or an immune disorder. In one embodiment, the test agent specifically binds a NKG2D ligand. In another embodiment, the NKG2D ligand comprises ULBP1, ULBP2, ULBP3, ULBP4, ULBP5, ULBP6, or a combination thereof. In some embodiments, the determining comprises measuring ligand-induced NKG2D activation of the NKG2D+ cell. In further embodiments, the compound decreases downstream receptor signaling of the NKG2D protein. In other embodiments, measuring ligand-induced NKG2D activation comprises one or more of measuring NKG2D internalization, DAP10 phosphorylation, p85 PI3 kinase activity, Akt kinase activity, production of IFNγ, and cytolysis of a NKG2D-ligand+ target cell. In some embodiments, the NKG2D+ cell is a lymphocyte or a hair follicle cell. In another embodiment, the lymphocyte is a Natural Killer cell, γδ-TcR+ T cell, CD8+ T cell, a CD4+ T cell, or a B cell.

[0019] One aspect of the invention encompasses a method of treating a hair-loss disorder in a mammalian subject in need thereof, the method comprising administering to the subject an antibody or antibody fragment that binds ULBP3, ULBP6, or PRDX5. The therapeutic amount of the composition would result in hair growth in the subject. In another embodiment, the hair-loss disorder comprises androgenetic alopecia, telogen effluvium, alopecia areata, telogen effluvium, tinea capitis, alopecia totalis, hypotrichosis, hereditary hypotrichosis simplex, or alopecia universalis. In a further embodiment, the administering comprises a subcutaneous, intra-muscular, intra-peritoneal, or intravenous injection; an infusion; oral, nasal, or topical delivery; or a combination thereof. In some embodiments, the administering occurs daily, weekly, twice weekly, monthly, twice monthly, or yearly.

[0020] One aspect of the invention provides for methods of treating a hair-loss disorder in a mammalian subject in need thereof, the method comprising administering to the subject an RNA molecule that specifically targets the PRDX5 gene encoding the PRDX5 protein. The therapeutic amount of the composition would result in hair growth in the subject. In one embodiment, the RNA molecule is an antisense RNA or a siRNA. In another embodiment, the hair-loss disorder comprises androgenetic alopecia, telogen effluvium, alopecia areata, telogen effluvium, tinea capitis, alopecia totalis, hypotrichosis, hereditary hypotrichosis simplex, or alopecia universalis. In a further embodiment, the administering comprises a subcutaneous, intra-muscular, intra-peritoneal, or intravenous injection; an infusion; oral, nasal, or topical delivery; or a combination thereof. In some embodiments, the administering occurs daily, weekly, twice weekly, monthly, twice monthly, or yearly.

[0021] One aspect of the invention provides for methods of treating a hair-loss disorder in a mammalian subject in need thereof, the method comprising administering to the subject an RNA molecule that specifically targets the ULBP3 gene encoding the ULBP3 protein. The therapeutic amount of the composition would result in hair growth in the subject. In one embodiment, the RNA molecule is an antisense RNA or a siRNA. In another embodiment, the hair-loss disorder comprises androgenetic alopecia, telogen effluvium, alopecia areata, telogen effluvium, tinea capitis, alopecia totalis, hypotrichosis, hereditary hypotrichosis simplex, or alopecia universalis. In a further embodiment, the administering comprises a subcutaneous, intra-muscular, intra-peritoneal, or intravenous injection; an infusion; oral, nasal, or topical delivery; or a combination thereof. In some embodiments, the administering occurs daily, weekly, twice weekly, monthly, twice monthly, or yearly.

[0022] One aspect of the invention provides for methods of treating a hair-loss disorder in a mammalian subject in need thereof, the method comprising administering to the subject an RNA molecule that specifically targets the ULBP6 gene encoding the ULBP6 protein. The therapeutic amount of the composition would result in hair growth in the subject. In one embodiment, the RNA molecule is an antisense RNA or a siRNA. In another embodiment, the hair-loss disorder comprises androgenetic alopecia, telogen effluvium, alopecia areata, telogen effluvium, tinea capitis, alopecia totalis, hypotrichosis, hereditary hypotrichosis simplex, or alopecia universalis. In a further embodiment, the administering comprises a subcutaneous, intra-muscular, intra-peritoneal, or intravenous injection; an infusion; oral, nasal, or topical delivery; or a combination thereof. In some embodiments, the administering occurs daily, weekly, twice weekly, monthly, twice monthly, or yearly.

[0023] An aspect of the invention encompasses a method for treating or preventing a hair-loss disorder in a mammalian subject in need thereof, the method comprising administering to the subject a therapeutic amount of a pharmaceutical composition comprising a functional HLDGC gene that encodes the HLDGC protein, or a functional HLDGC protein, thereby treating or preventing a hair-loss disorder. The therapeutic amount of the composition would result in hair growth in the subject. In a further embodiment, the administering comprises a subcutaneous, intra-muscular, intra-peritoneal, or intravenous injection; an infusion; oral, nasal, or topical delivery; or a combination thereof. In one embodiment, the administering comprises delivery of a functional HLDGC gene that encodes the HLDGC protein, or a functional HLDGC protein to the epidermis or dermis of the subject. In some embodiments, the administering occurs daily, weekly, twice weekly, monthly, twice monthly, or yearly. In one embodiment, the HLDGC gene or protein is CTLA-4, IL-2, IL-21, IL-2RA/CD25, IKZF4, a HLA Region residing gene, PTGER4, PRDX5, STX17, NKG2D, ULBP6, ULBP3, HDAC4, CACNA2D3, IL-13, IL-6, CHCHD3, CSMD1, IFNG, IL-26, KIAA0350 (CLEC16A), SOCS1, ANKRD12, or PTPN2. In one embodiment, the HLDGC gene or protein is PRDX5. In another embodiment, the HLA Region residing gene is selected from the group consisting of a gene of the HLA Class I Region, a gene of the HLA Class II Region, PTPN22, and AIRE. In a further embodiment, the HLA Class I Region gene is HLA-A, HLA-B, HLA-C, HLA-DQB1, HLA-DRB1, MICA, MICB, HLA-G, and NOTCH4. In some embodiments, the HLA Class II Region gene is HLA-DOB, HLA-DQA1, HLA-DQA2, HLA-DQB2, TAP2, and HLA-DRA. In other embodiments, the hair-loss disorder comprises androgenetic alopecia, telogen effluvium, alopecia areata, telogen effluvium, tinea capitis, alopecia totalis, hypotrichosis, hereditary hypotrichosis simplex, or alopecia universalis.

[0024] An aspect of the invention provides for treating or preventing a hair-loss disorder in a mammalian subject in need thereof, the method comprising administering to the subject a therapeutic amount of a pharmaceutical composition comprising the composition of an antibody that specifically binds to the HLDGC protein or a fragment thereof; an antisense RNA that specifically inhibits expression of a HLDGC gene that encodes the HLDGC protein; or a siRNA that specifically targets the HLDGC gene encoding the HLDGC protein, thereby treating or preventing a hair-loss disorder. The therapeutic amount of the composition would result in hair growth in the subject. In one embodiment, the siRNA comprises a nucleic acid sequence comprising any one sequence of SEQ ID NOS: 41-6152. In a further embodiment, the administering comprises a subcutaneous, intra-muscular, intra-peritoneal, or intravenous injection; an infusion; oral, nasal, or topical delivery; or a combination thereof. In another embodiment, the administering comprises delivery of the composition to the epidermis or dermis of the subject. In some embodiments, the administering occurs daily, weekly, twice weekly, monthly, twice monthly, or yearly. In one embodiment, the HLDGC gene or protein is CTLA-4, IL-21, IL-2RA/CD25, IKZF4, a HLA Region residing gene, PTGER4, PRDX5, STX17, NKG2D, ULBP6, ULBP3, HDAC4, CACNA2D3, IL-13, IL-6, CHCHD3, CSMD1, IFNG, IL-26, KIAA0350 (CLEC16A), SOCS1, ANKRD12, or PTPN2. In one embodiment, the HLDGC gene or protein is ULBP3. In one embodiment, the HLDGC gene is ULBP6. In another embodiment, the HLA Region residing gene is selected from the group consisting of a gene of the HLA Class I Region, a gene of the HLA Class II Region, PTPN22, and AIRE. In a further embodiment, the HLA Class I Region gene is HLA-A, HLA-B, HLA-C, HLA-DQB1, HLA-DRB1, MICA, MICB, HLA-G, and NOTCH4. In some embodiments, the HLA Class II Region gene is HLA-DOB, HLA-DQA1, HLA-DQA2, HLA-DQB2, TAP2, and HLA-DRA. In other embodiments, the hair-loss disorder comprises androgenetic alopecia, telogen effluvium, alopecia areata, telogen effluvium, tinea capitis, alopecia totalis, hypotrichosis, hereditary hypotrichosis simplex, or alopecia universalis.

[0025] One aspect of the invention provides for methods of treating a hair-loss disorder in a mammalian subject in need thereof, the method comprising administering to the subject a therapeutic amount of a pharmaceutical composition comprising a functional PRDX5 gene that encodes the PRDX5 protein, or a functional PRDX5 protein. The therapeutic amount of the composition would result in hair growth in the subject. In another embodiment, the hair-loss disorder comprises androgenetic alopecia, telogen effluvium, alopecia areata, telogen effluvium, tinea capitis, alopecia totalis, hypotrichosis, hereditary hypotrichosis simplex, or alopecia universalis. In a further embodiment, the administering comprises a subcutaneous, intra-muscular, intra-peritoneal, or intravenous injection; an infusion; oral, nasal, or topical delivery; or a combination thereof. In some embodiments, the administering occurs daily, weekly, twice weekly, monthly, twice monthly, or yearly.

### BRIEF DESCRIPTION OF THE FIGURES

[0026] The patent or application file contains at least one drawing executed in color. Copies of this patent or patent application publication with color drawings will be provided by the Office upon request and payment of the necessary fee.

[0027] The original color versions of FIGS. 1-7 can be viewed in Petukhova et al., Nature. 2010 Jul. 1; 466(7302):113-7 (including the accompanying Supplementary Information available in the on-line version of the manuscript available on the Nature web site). For the purposes of the this application, the contents of Petukhova et al., Nature. 2010 Jul. 1; 466(7302):113-7, including the accompanying “Supplementary Information,” are herein incorporated by reference.

[0028] FIG. 1 are photographic images of clinical manifestations of AA. In the upper panels (FIGS. 1A-B), patients with AA multiplex. In FIG. 1B, the patient is in regrowth phase. For patients with alopecia universalis (AU), there is a complete lack of body hair and scalp hair (FIG. 1C), while patients with alopecia totalis only lack scalp hair (FIG. 1D). In FIG. 1D, hair regrowth is observed in the parietal region, while no regrowth in either occipital or temporal regions is evident.

[0029] FIG. 2 is a graph of a Manhattan plot of the joint analysis of the discovery genomewide association study (GWAS) and the replication GWAS. Results are plotted as the -log transformed p-values from a genotypic association test controlled for residual population stratification as a function of the position in the genome. Odd chromosomes are in gray and even chromosomes are in black. Ten genomic regions contain SNPs that exceed the genome-wide significance threshold of 5×10⁻⁷ (black line).

[0030] FIGS. 3A-P are graphs of the linkage disequilibrium (LD) structure and haplotype organization of the implicated regions from GWAS. In all graphs, the genome-wide significance threshold (5×10⁻⁷) is indicated by a black dotted line. Results from the eight regions are aligned with LD maps (FIGS. 3A, 3C, 3E, 3G, 3I, 3K, 3M, 3O) and transcript maps (FIGS. 3B, 3D, 3F, 3H, 3J, 3L, 3N, 3P): chromosome 2q33 (FIGS. 3A, 3B), 4q26-27 (FIGS. 3C, 3D), 6p21.3 (FIGS. 3E, 3F), 6q25 (FIGS. 3G, 3H), 9q31.1 (FIGS. 3I, 3J), 10p15-p16 (FIGS. 3K, 3L), 11q13 (FIGS. 3M, 3N), and 12q13 (FIGS. 3O, 3P). For the plots with the LD maps, dark grey indicates high LD as measured by D′. For the plots with the transcript maps, SNPs that do not reach significance are in grey while significantly associated SNPs are in color, coded by the risk haplotypes. For example in FIG. 3B, conditioning on any of the black SNPs, will reduce evidence for association of the other black SNPs, but will not affect any of the white SNPs. On chromosome 6p in the HLA, significantly associated SNPs can be organized into at least five distinct haplotypes. Pair-wise LD was measured by r² for the most significant SNP in each haplotype and defines the LD block that is demonstrating association.

[0031] FIGS. 3Q-R are graphs of the cumulative effect of risk haplotypes is indicated by the distribution of the genetic liability index (GLI) in cases and controls. Given that we were able to reduce the redundancy of 141 significantly associated SNPs within the ten regions to 18 independent effects, we sought to determine if the effects of the risk alleles are cumulative. We chose one SNP from each haplotype to serve as a proxy for the haplotype, choosing the most significantly associated SNP. The GLI is calculated as the sum of the risk alleles carried by an individual. The GLI distribution changes as a function of phenotype. No control sample carried more than 16 risk alleles in total while no case sample carried less than 4 risk alleles. As the number of risk alleles in an individual increases, the proportion affected by AA increases. The distribution of GLI in cases (dark grey) and controls (light grey) is shown in FIG. 3Q. The conditional probability of phenotype given a number of risk alleles is shown in FIG. 3R (AA in gray, control in black).

[0032] FIGS. 4A-L are photomicrographs showing ULBP3 expression and immune cell infiltration of AA hair follicles. FIGS. 4A-B show low levels of expression of ULBP3 in the dermal papilla of hair follicles from two unrelated, unaffected individuals. FIGS. 4C-D show massive upregulation of ULBP3 expression in the dermal sheath of hair follicles from two unrelated patients with AA in the early stages of disease. FIGS. 4E-F show the absence of immune infiltration in two control hair follicles. FIG. 4G shows hematoxylin and eosin staining of AA hair follicle. DS, dermal sheath; Mx, matrix; DP, dermal papilla. FIGS. 4H-I show immunofluorescence analysis using CD3 and CD8 cell surface markers for T cell lineages. Note the marked inflammatory infiltrate in the dermal sheath of two affected AA hair follicles. FIGS. 4J-L show double-immunofluorescence analysis with anti-CD3 and anti-CD8 antibodies. The merged image of FIG. 4J and FIG. 4K shows infiltration of CD3+CD8+ T cells in the dermal sheath of AA hair follicle (FIG. 4L). FIG. 4D and FIGS. 4G-L are serial sections of the same hair follicle of an affected individual. The cells were counterstained with DAPI (FIGS. 4A-F, 4H, 4I, 4L). Scale bar: 50 μm (a). AA, alopecia areata patients; NC, normal control individuals.

[0033] FIGS. 4M-O are photomicrographs of double-immunostainings with an anti-CD8 and an anti-NKG2D antibodies revealed that most CD8+ T cells co-expressed NKG2D (FIG. 4M, FIG. 4N, and FIG. 4O).

[0034] FIG. 4P is a bar graph that summarizes immunohistochemical in situ evidence of ULBP3 in human hair follicles compared between normal and lesional AA skin. Compared with control skin, immunohistology showed a significantly increased number of ULBP3+ cells in the dermis and the dermal sheath (CTS). In addition, positive cells were also up-regulated parafollicular around the hair bulb in AA samples.

[0035] FIG. 5 is a schematic showing the Confounding analysis is used to infer relationships between associated SNPs. An example is presented in FIG. 5A, in which two SNPs show significant association to a trait (in red). Directed acyclic graphs (DAGs) illustrate two alternative causal models that may underlie the observed data. In FIG. 5B, the effect observed for SNP₂ is explained entirely by the association of SNP₁ and the disease so that while OR_{SNP2}≠1, OR_{SNP2|SNP1}=1. In FIG. 5C, the effect of SNP₂ is independent of the effect of SNP₁ and conditioning on SNP₁ will not alter the OR of SNP₂ (OR_{SNP2|SNP1}≠1).

[0036] FIG. 6 are photomicrographs showing that PTGER4, STX17, and PRDX5 are expressed in human hair follicles. In FIGS. 6A-C, PTGER4 is predominantly expressed in Henle's (He) layer of the inner root sheath (IRS) of human HF. The localization of PTGER4 was confirmed by double-immunolabeling with K74 protein which is specifically expressed in Huxley's layer (Hu) of the IRS (FIGS. 6B-C). In FIGS. 6D-F, STX17 is expressed in hair shaft and IRS of human HF whose expression overlaps with K31 protein in the hair shaft cortex (HSCx). In FIGS. 6G-I, PRDX5 shows a similar expression pattern with STX17. Right panels are merged images and cells were counterstained with DAPI (FIGS. 6C, 6F, 6I). Scale bars: 100 μm.

[0037] FIG. 7 depicts mRNA expression levels of AA related genes in scalp and whole blood cells (WBC). Relative transcripts levels of AA associated genes were quantified using (FIG. 7A) quantitative PCR and (FIG. 7B) real time PCR in human scalp and whole blood sample. Elevated ULBP3 levels were observed in the scalp, IKZF4 and PTGER4 in WBC whereas PRDX5 and PTGER4 exhibited comparable expression in both. GAPDH was used as a normalization control. IL2RA and KRT15 were used as positive controls for WBC and scalp respectively.

[0038] FIG. 8 is a graph showing that immune response genes are vulnerable to positive selection, which increases allele frequencies, thus making this class of genes amenable to detection with GWAS (upper arrow). The lower arrow indicates the ‘gray zone’ of significance (5×10⁻⁷>p>0.01) for hair gene.

[0039] FIG. 9 is a graph showing the results from the linkage analyses of 471 GWAS genes, finding that 121 genes fell into regions for linkage (1<LOD<4). Results are shown for chromosome 12.

[0040] FIG. 10 is a graph showing genotyping of a small subset of patients with severe disease (AU) from the GWAS cohort at the DRB1 locus.

[0041] FIG. 11 shows the upregulation of NKG2DL expression in the unaffected HF of AA patients. Biopsies from both lesional and unaffected scalp were obtained from patients with AA and psoriasis. ULBP3 expression in isolated HF was examined by immunofluorescence.

[0042] FIGS. 12A-B shows the upregulation of HF NKG2DL in AA. FIG. 12A. qRT-PCR analysis of the expression of MICA & ULBP1-6 in normal skin and three lesional AA skin biopsies. FIG. 12B. IF microscopy of MICA & ULBP1-6 in AA and control HFs.

[0043] FIG. 13. FIG. 13A. Lysis of TNF-primed dermal sheath (DS) cells by lymphokine activated killer cells (LAKs) in vitro requires NKG2D. C3H/HeJ DS celles were treated with or without TNF for three days and then incubated with IL-2 induced LAKs in the presence of absence of neutralizing anti-NKG2D (CX5) antibody (* p<0.05). FIG. 13B. CX5 purified from hybridoma media by affinity chromatography and analyzed by SDS-PAGE.

[0044] FIG. 14 is a gel that shows and RNA analysis of ULBPs.

[0045] FIG. 15 are fluorescence photomicrographs showing in situ results of ULBP3 in normal HF(a) and HF from two AA patients (b and c).

[0046] FIG. 16 are fluorescence photomicrographs showing PRDX5 staining in normal HF.

[0047] FIG. 17 is a bar graph showing activation of the ULBP6 promoter by NF-κB pathway components. HEK293 cells were co-transfected with luciferase reporter constructs driven by tandem kB sites, or either ULBP3 or ULBP6 promoters and NF-κB p65, the MyD88 adaptor protein or NF-κB activating kinase IKKβ.

[0048] FIG. 18 is a bar graph and fluorescence photomicrographs. The bar graph (TOP) shows upregulation of NKG2DL mRNA in lesional AA skin. qRT-PCR analysis of the expression of MICA, ULBP3 and ULBP6 in normal skin and lesional AA skin biopsies. IF microscopy (BOTTOM) is shown for ULBP3 detection in AA and psoriatic skin. Lesional AA and psoriatic hair follicles and remission AA hair follicles (12 years) or non-lesional and lesional psoriatic or remission AA epidermis were stained using anti-CD3, anti-ULBP3 and with DAPI.

[0049] FIG. 19 shows CTLA4 isoforms schematic structure and their expression in human T cells. Two new CTLA4 isoforms: Li-CTLA4, ¼CTLA4 were found in human. FIG. 19A. liCTLA4 lacks exon2 which encodes the IgV-like domain that binds B7-1 (CD80) and B7-2 (CD86) ligands on antigen-presenting cells; sCTLA4 lacks exons encoding transmembrane domain and ¼CTLA4 lacks both exons 2 and 3. FIG. 19B. RT-PCR was performed in total RNA isolated from human spleen T cells. Two sets of primers were used, set 1 forward primer is specific for liCTLA4 by spanning the boundary of exon1 and 3, while set 2 is common for all the 4 isoforms by targeting exon1 and exon 4. Isoforms were confirmed by purifying the gel and subsequent sequencing: FIG. 19C. Sequence of liCTLA4 spanning exon1 and 3; FIG. 19D. Sequence of ¼CTLA4 crossing exon1 and 4.

[0050] FIG. 20 shows CTL4A expression in time-course stimulated human total blood T cells. Human total blood T cells were stimulated using CD3+CD28 Ab, cells were harvested at 0, 2, 6, 24, 50, 72, and 96 hr after Stimulation. Total RNA was extracted and RT-PCR was performed using either isoform-specific primer (Li-CTLA4) or common primer (for the rest isoforms). Beta-actin was chosen as endogenous control. CTLA4 isoforms are expressed in unstimulated T cells. After stimulation, Li-CTLA4 showed similar/stable expression after 24 hr; S-CTLA4 expression disappeared; F-CTLA4 expression is higher given longer stimulation time. Although ¼CTLA4 is expressed in unstimulated PBMC based on other experiment, it did not present here due to primer competition, it will be redone for this experiment using isoform specific primer.

[0051] FIGS. 21A-D are bar graphs of SNP rs3087243 A/G associated with Li, ¼-CTLA4 expression in total blood T cells from T1D patients. SNP rs3087243 (+6230A/G) was reported to strongly associated with autoimmune diseases, including AA and T1D. It was also shown to affect levels of soluble CTLA4—risk allele G carriers had lower expression of sCTLA4. Here, q-PCR using isoform specific primers was performed to examine CTLA4 4 expression in total blood T cells from 10 T1D patients. For each isoform, expression level was normalized to GAPDH and the relative expression level was calculated using ddCt method. Genotype data was got by direct sequencing. T1D-risk allele (G) was highlighted in red. It was found that risk allele G carriers had lower expression of Li-CTLA4 and ¼ CTLA4.

[0052] FIGS. 22A-B are graphs showing CTLA4 expression in human PBMC (AA vs. control, T1D vs. control). Q-PCR was performed using specific primers to check CTLA4 isoform expression in human PBMC. Difference was compared between 12 AA patients and 14 normal control (N=14) (upper panel), as well as 14 T1D patients and 14 normal control groups (lower panel). No difference was observed between AA vs. controls, however, Li-, ¼, and F-CTLA4 showed higher expression in T1D patients compared to controls. All expression data was normalized to GAPDH.

[0053] FIG. 23 is a gel that shows CTLA4 expression in mouse blood. Isoform-specific primers for CTLA4 were designed to check the CTLA4 expression pattern in mouse blood. RT-PCR showed all the four isoforms are expressed in mouse blood.

[0054] FIG. 24 comprises bar graphs showing higher CTLA4 expression in CTLA4-IgG treated (at 4 week) mouse. To check if exdogenous CTLA4 has any effect on preventing the development of AA, and to check if the endogenous CTLA4 expression is influenced by this process, a prevention trial was done on 3 groups of grafted mosue: Sham group (n=2) received no treatment, PBS group (n=3) only received PBS, while CTLA4-IgG group was administrated with CTLA4-IgG (n=3). Blood was extracted at 0 w, 2 w, 4 w, and 6 w. Q-PCR using isoform-specific primers was performed to check the CTLA4 expression. Gapdh was used as normalized gene. No difference in CTLA4 expression was observed among the 3 groups at 0 and 2 week. However, significantly increased expression for all the isoforms was observed in CTLA4-IgG treated group at week 4 compared to the PBS treated control group. CTLA4 expression is increased during the trial process (at least before week 4).

[0055] FIG. 25 comprises bar graphs showing higher CTLA4 expression in CTLA4-IgG treated (at 4 week) mouse. To check if exdogenous CTLA4 has any effect on preventing the development of AA, and to check if the endogenous CTLA4 expression is influenced by this process, we did a prevention trial on 3 groups of grafted mosue: Sham group (n=2) received no treatment, PBS group (n=3) only received PBS, while CTLA4-IgG group was administrated with CTLA4-IgG (n=3). Blood was extracted at 0 w, 2 w, 4 w, and 6 w. Q-PCR using isoform-specific primers was performed to check the CTLA4 expression. Gapdh was used as normalized gene. No difference in CTLA4 expression was observed among the 3 groups at 0 and 2 week. However, significantly increased expression for all the isoforms was observed in CTLA4-IgG treated group at week 4 compared to the PBS treated control group. CTLA4 expression is increased during the tial process (at least before week 4).

[0056] FIG. 26 shows Hair Follicle Expression of NKG2D ligands under inflammatory conditions. Human vibrissae follicles were micro-dissected and organ cultured for 2 days in presence of proinflammatory cytokines—IFNγ, TLR ligands—LPS or dI:dC and TNFα. Immunofluorescence staining of the human follicles for NKG2D Ligands—MICA, ULBP3 and Pan NKG2DL showed higher expression in the dermal sheath compartment of the hair follicle suggesting responsiveness to inflammatory mediators.

[0057] FIG. 27 shows elevated NKG2D ligand expression in Alopecia Areata affected skin. Quantitative realtime PCR was carried out to assess the mRNA expression levels of NKG2D ligands MICA, Ulbp3 and Ulbp6 in the affected scalp skin of alopecia areata patients compared to normal control skin. The expression levels were elevated in the affected skin compared to control skin (N=3).

[0058] FIG. 28 shows transcript expression of ULBP3 from previous microarray studies on autoimmune disorders (NIH-Gene Expression Omnibus). Data for ULBP3 expression data was derived from gene expression repository at NIH (GEO). Elevated expression of ULBP3 transcript is associated with autoimmune disorders such as psoriasis, scleroderma rheumatoid arthritis and ulcerative colitis. Elevation of ULBP3 expression is also observed in atopic disease—Asthma and contact dermatitis. This corroborates with several studies in literature which support the elevated expression of NKG2D ligands in autoimmune disorders.

[0059] FIG. 29 shows genotoxic stress (DNA damage inducing) causes transient negative regulation of NKG2D ligand promoter activity. Cloning of 5′ upstream 3 kb promoter region of MICA, ULBP3 and ULBP6 was carried out in the pGL3 Luciferase reporter vector. The effect of genotoxic Stress on ULBP promoter activity was assessed using HEK293T cells which were transfected with these reporter constructs. The transfected cells were subjected to 60 min of heat shock treatment at 42° C. followed by a recovery period of 3 h and 16 h. Cells were also subjected to 300 J/m² of UVB exposure followed by a similar 3 h and 16 h recovery. Interestingly a reduction in the promoter induced transcription of all the three NKG2D ligands—MICA, ULBP3 and ULBP6 was observed as assessed by the luciferase activity. The reduction was abrogated by 16 h after treatment indicating the transient nature of the negative regulation. On similar lines, reduction in the promoter activity post UVB treatment was also observed after 3 h of treatment. The promoter region of both ULBP3 and ULBP6 contain several heat shock factor binding elements which are induced after heatshock or UV treatment.

[0060] FIG. 30 shows the effect of heat shock on deletion constructs of ULBP3 promoter. Deletion constructs were generated to assess the role of HSE in the regulation of ULBP3 expression. The 3 kb promoter region contains several heat shock binding elements, to which heat shock factors bind and regulate expression in both positive and negative fashion. ULBP3 promoter shows HSE mediated negative regulation of expression when subjected to heat shock.

[0061] FIG. 31 shows the regulation of NKG2D ligand promoter activity by stress hormones. HEK293T cells transfected with ULBP3 promoter construct were subjected to stress hormones substance P and corticosterone for 16 h, an upregulation in the luciferase expression was observed for ULBP3 promoter (FIG. 31A). Primary fibroblasts (FIG. 31B) as well as dermal sheath (DS) cells (FIG. 31C) were transfected with NKG2D ligands MICA, ULBP3 and ULBP6 and were given 16 h treatment of stress hormones—corticotrophin releasing hormone (CRH), substance P(SP), and corticosteroids. Fibroblasts showed an upregulation of ULBP3 with CRH, SP and corticosteroid treatment whereas upregulation was observed with CRH and corticosteroid treatment in DS cells.

[0062] FIG. 32 shows the effect of inflammatory cytokines on NKG2D ligand promoter activity in Dermal Sheath cells. To assess the role of inflammatory cytokines on ULBP promoter activity, dermal sheath cells were transfected with ULBP 3′ 5-kb promoter luciferase reporter construct. A significant elevation in the promoter activity was observed in ULBP3 following an 8 hr IFNγ treatment. Dermal sheath cells transfected with ULBP6 constructs showed a dramatic upregulation with TNFa treatment. Similar effects were observed with 293 T cells. The 3′ promoter region of ULBP6 contains 3 NfκB binding sites at positions: −2940 bp, −2235 bp and −1670 bp with respect to transcriptional start site. Deletion constructs were generated omitting the NfκB binding sites and promoter activity was assessed. −2940 NFkb sites seem to contribute significantly in the TNFa induced upregulation of the ULBP6 expression.

[0063] FIG. 33 shows the effect of TNFα on deletion constructs of ULBP6 promoter in 293T Cells.

[0064] FIG. 34. shows NKG2D ligand transcript tegulation via 3′UTR under Stress Conditions. In addition to 5′ promoter region we also assessed the effect of stress on the mRNA stability. The 3′UTR region of Ulbp3 and Ulbp6 was cloned under the psiCheck2 luciferase reporter construct and transfected 293T cells with the constructs. The cells were subjected to heat shock, TNFa, IL-2 and IFNg treatment. Greater mRNA stability was observed with heatshock and TNFa treatment for ULBP3 and ULBP6. The 3′ UTR region is subject to regulation by micro RNAs. Cellular stress is associated with changes in the microRNA regulation of the genome. HEK 293T cells were co transfected with mir124, one of the predicted microRNAs binding the 3′UTR of both ULBP3 and ULBP6. RT PCR for the predicted microRNAs common to both ULBP3 and ULBP6. Cotransfection with the microRNA constructs and assay luciferase activity.

[0065] FIG. 35 shows the co-culture of target cells over expressing NKG2D ligands with NK Cells. Cloning of open reading frame of MICA, ULBP3 and ULBP6 was carried out in the pCXN1 vector and expression of ULBP3 and ULBP6 was assessed using immunofluorescence in cells transfected with the over expression vector. Primarily membrane bound and some cytoplasic expression was observed indicating membrane targeting of the expressed protein. Hek 293 T cells and primary cultures of fibroblasts as well as dermal sheath cells were transfected with the overexpression vectors for ULBP3, ULBP6 and MICA. The cells were further incubated with human natural killer cell line NK92MI to assess the differential cytotoxic response when NKG2D ligands are over expressed. Elevated cytotoxicty as assessed by elevated LDH release into the culture media was observed. The lysed target cells stained with propidium iodide shown in red and are distinguishable from live dye stained NK cell effectors (green). A greater number of propidium iodide staining cells were observed in the NKG2D ligand over-expressing dermal sheath cells.

[0066] FIG. 36 shows co-culture of human hair follicles with LAK cells. Human vibrissae follicles were micro-dissected and organ cultured for 2 days in presence of proinflammatory cytokines—IFNγ, LPS and TNFα. Individual follicles were subsequently incubated with green CFSE labeled LAK cells overnight to assess immune interaction. Elevated accumulation of LAK cells was observed on treated follicles indicating an up-regulation of NKG2D ligands on follicular surface. Mediation of cytotoxic response is in part carried out by induction of NKG2D Ligands which interact with NKG2D receptor bearing lymphocytes such as NK cells, Tc-cells, γδ T-cells. Induction of catagen in the ex vivo cultured hair follicles in presence of TNFα and IFNγ was also observed.

[0067] FIG. 37 shows a human cytotoxicity assay. Primary cultured dermal sheath cells derived from human skin were given a combined IFNγ/LPS and TNFα treatment for 3 days. Differential cytotoxic response of matching LAK cells derived from blood lymphocytes was assessed using LDH release assay. Increased cytotoxic response in treated cells was observed which is reduced in presence of NKG2D blocking antibody indicating the role of NKG2D ligand in mediating cytotoxic response. Similar assessment of cytotoxic response in primary cultured human keratinocytes treated with combined IFNγ/LPS and IFNγ/polydI:dC and TNFα also shows NKG2D receptor-ligand mediated dependence of LAK killing assay

[0068] FIG. 38 are fluorescent micrographs showing Expression of MICA, ULBP3 and ULBP6 in AA skin.

[0069] FIG. 39 are graphs showing NKG2D Ligand Transcript Expression in Alopecia Areata Skin. P FIG. 40. is a bar graph showing the effect of inflammatory cytokines on deletion constructs of ULBP promoters in 293T cells.

[0070] FIG. 41 is a bar graph showing the effect of stress hormones on NKG2D ligand promoter activity in dermal sheath cells.

[0071] FIG. 42 is a bar graph that shows the outermost mesodermal cellular layer of the hair follicles—dermal sheath (DS) cells were derived and primary cultured from micro-dissected human hair follicles. DS cells were treated with IFNγ for 24 h and the transcript levels of NKG2DLs—were assessed by real-time qPCR (N=4). An upregulation of message levels of NKG2DLs ULBP3 and MICA was observed.

[0072] FIG. 43 shows fluorescent photomicrographs. Human vibrissae follicles were micro-dissected and organ cultured for 2 days in presence of proinflammatory cytokine—IFNγ and TLR ligands—LPS and polydI:dC. Immunofluorescence staining of the follicles for NKG2D Ligands—MICA, ULBP3 and Pan NKG2DL shows higher expression in the DS compartment of the hair follicle indicating responsiveness to inflammatory mediators—IFNγ, LPS and poly dI:dC.

[0073] FIG. 44 shows photomicrographs. The efficacy of these inflammatory mediators in inducing NKG2DLs in mice was further determined by intra-dermal injections of IFNγ, LPS and IFNγ/LPS in combination in skin reinitiated for anagen phase by hair plucking. Staining of the skin, 24 hour post-treatment, showed a higher expression of Pan NKG2DL and Rae1 expression in the follicles.

[0074] FIG. 45 shows photomicrographs. Human and C3H/HeJ mice vibrissae follicles were micro-dissected and organ cultured for 2 days in presence of proinflammatory cytokine—IFNγ and TLR ligand—LPS. Individual follicles were subsequently incubated with green CFSE labeled LAK cells overnight to assess immune interaction. Elevated accumulation of LAK cells was observed on treated follicles indicating an up-regulation of interacting ligands on follicular surface. Interestingly, follicles derived from alopecic mice also showed enhanced LAK cell recruitment. Mediation of cytotoxic response is in part carried out by induction of NKG2D ligands which interact with NKG2D receptor bearing lymphocytes such as NK cells, Tc-cells, γδ T-cells.

[0075] FIG. 46 shows bar graphs. Primary cultured dermal sheath and dermal papilla cells derived from C57BL/6 mice were given a combined IFNγ and LPS treatment for 3 days. Differential cytotoxic response of match LAK cells derived from C57BL/6 lymph nodes was assessed using LDH release assay. Increased cytotoxic response in treated cells was observed which diminished in presence of NKG2D blocking antibody, thus indicating the role of NKG2D ligands in mediating cytotoxic response. Similar assessment of cytotoxic response in primary cultured human keratinocytes treated with IFNγ and polydI:dC also shows NKG2D receptor-ligand interaction mediated dependence of LAK cell cytotoxicity.

[0076] FIG. 47 shows fluorescent photomicrographs. p65 NFκB subunit KO under skin specific keratin14 basal cell component driver mice was generated. The p65 k14 cKO mice were treated with IFNγ, LPS and IFNγ/LPS intradermally for 24 h. The KO mice skin display reduced NKG2D ligands expression compared to litter mate controls in the epidermis and hair follicles as shown by pan-NKG2DL immunofluorescence staining, indicating an NFκB dependence on induction of NKG2DLs.

### DETAILED DESCRIPTION OF THE INVENTION

[0077] The invention provides for a group of genes that can be used to define susceptibility to Alopecia Areata (AA), a common autoimmune form of hair loss, where at least 8 loci have been defined, each containing several SNPS, that can be used to define such susceptibility.

[0078] There are several aspects to this invention. In one embodiment, the invention provides for a therapy that is directed against any and/or all of the genes of the group. In another embodiment, a predictive DNA-based test is used determine the likelihood and/or severity of a hair-loss disorder, such as AA.

[0079] Overview of the Integument and Hair Cells

[0080] The integument (or skin) is the largest organ of the body and is a highly complex organ covering the external surface of the body. It merges, at various body openings, with the mucous membranes of the alimentary and other canals. The integument performs a number of essential functions such as maintaining a constant internal environment via regulating body temperature and water loss; excretion by the sweat glands; but predominantly acts as a protective barrier against the action of physical, chemical and biologic agents on deeper tissues. Skin is elastic and except for a few areas such as the soles, palms, and ears, it is loosely attached to the underlying tissue. It also varies in thickness from 0.5 mm (0.02 inches) on the eyelids (“thin skin”) to 4 mm (0.17 inches) or more on the palms and soles (“thick skin”) (Ross M H, Histology: A text and atlas, 3^{rd} edition, Williams and Wilkins, 1995: Chapter 14; Burkitt H G, et al, Wheater's Functional Histology, 3^{rd} Edition, Churchill Livingstone, 1996: Chapter 9).

[0081] The skin is composed of two layers: a) the epidermis and b) the dermis. The epidermis is the outer layer, which is comparatively thin (0.1 mm). It is several cells thick and is composed of 5 layers: the stratum germinativum, stratum spinosum, stratum granulosum, stratum lucidum (which is limited to thick skin), and the stratum corneum. The outermost epidermal layer (the stratum corneum) consists of dead cells that are constantly shed from the surface and replaced from below by a single, basal layer of cells, called the stratum germinativum. The epidermis is composed predominantly of keratinocytes, which make up over 95% of the cell population. Keratinocytes of the basal layer (stratum germinativum) are constantly dividing, and daughter cells subsequently move upwards and outwards, where they undergo a period of differentiation, and are eventually sloughed off from the surface. The remaining cell population of the epidermis includes dendritic cells such as Langerhans cells and melanocytes. The epidermis is essentially cellular and non-vascular, containing little extracellular matrix except for the layer of collagen and other proteins beneath the basal layer of keratinocytes (Ross M H, Histology: A text and atlas, 3^{rd} edition, Williams and Wilkins, 1995: Chapter 14; Burkitt H G, et al, Wheater's Functional Histology. 3^{rd} Edition, Churchill Livingstone, 1996: Chapter 9).

[0082] The dermis is the inner layer of the skin and is composed of a network of collagenous extracellular material, blood vessels, nerves, and elastic fibers. Within the dermis are hair follicles with their associated sebaceous glands (collectively known as the pilosebaceous unit) and sweat glands. The interface between the epidermis and the dermis is extremely irregular and uneven, except in thin skin. Beneath the basal epidermal cells along the epidermal-dermal interface, the specialized extracellular matrix is organized into a distinct structure called the basement membrane (Ross M H, Histology: A text and atlas, 3^{rd} edition, Williams and Wilkins, 1995: Chapter 14; Burkitt H G, et al, Wheater's Functional Histology, 3^{rd} Edition, Churchill Livingstone, 1996: Chapter 9).

[0083] The mammalian hair fiber is composed of keratinized cells and develops from the hair follicle. The hair follicle is a peg of tissue derived from a downgrowth of the epidermis, which lies immediately underneath the skin's surface. The distal part of the hair follicle is in direct continuation with the external, cutaneous epidermis. Although a small structure, the hair follicle comprises a highly organized system of recognizably different layers arranged in concentric series. Active hair follicles extend down through the dermis, the hypodermis (which is a loose layer of connective tissue), and into the fat or adipose layer (Ross M H, Histology: A text and atlas, 3^{rd} edition, Williams and Wilkins, 1995: Chapter 14; Burkitt H G, et al, Wheater's Functional Histology, 3^{rd} Edition, Churchill Livingstone, 1996: Chapter 9).

[0084] At the base of an active hair follicle lies the hair bulb. The bulb consists of a body of dermal cells, known as the dermal papilla, contained in an inverted cup of epidermal cells known as the epidermal matrix. Irrespective of follicle type, the germinative epidermal cells at the very base of this epidermal matrix produce the hair fiber, together with several supportive epidermal layers. The lowermost dermal sheath is contiguous with the papilla basal stalk, from where the sheath curves externally around all of the hair matrix epidermal layers as a thin covering of tissue. The lowermost portion of the dermal sheath then continues as a sleeve or tube for the length of the follicle (Ross M H, Histology: A text and atlas, 3^{rd} edition, Williams and Wilkins, 1995: Chapter 14; Burkitt H G, et al, Wheater's Functional Histology, 3^{rd} Edition, Churchill Livingstone, 1996: Chapter 9).

[0085] Developing skin appendages, such as hair and feather follicles, rely on the interaction between the epidermis and the dermis, the two layers of the skin. In embryonic development, a sequential exchange of information between these two layers supports a complex series of morphogenetic processes, which results in the formation of adult follicle structures. However, in contrast to general skin dermal and epidermal cells, certain hair follicle cell populations, following maturity, retain their embryonic-type interactive, inductive, and biosynthetic behaviors. These properties can be derived from the very dynamic nature of the cyclical productive follicle, wherein repeated tissue remodeling necessitates a high level of dermal-epidermal interactive communication, which is vital for embryonic development and would be desirable in other forms of tissue reconstruction.

[0086] The hair fiber is produced at the base of an active follicle at a very rapid rate. For example, follicles produce hair fibers at a rate 0.4 mm per day in the human scalp and up to 1.5 mm per day in the rat vibrissa or whiskers, which means that cell proliferation in the follicle epidermis ranks amongst the fastest in adult tissues (Malkinson F D and J T Kearn, Int J Dermatol 1978, 17:536-551). Hair grows in cycles. The anagen phase is the growth phase, wherein up to 90% of the hair follicles said to be in anagen; catagen is the involuting or regressing phase which accounts for about 1-2% of the hair follicles; and telogen is the resting or quiescent phase of the cycle, which accounts for about 10-14% of the hair follicles. The cycle's length varies on different parts of the body.

[0087] Hair follicle formation and cycling is controlled by a balance of inhibitory and stimulatory signals. The signaling cues are potentiated by growth factors that are members of the TGFβ-BMP family. A prominent antagonist of the members of the TGFβ-BMP family is follistatin. Follistatin is a secreted protein that inhibits the action of various BMPs (such as BMP-2, -4, -7, and -11) and activins by binding to said proteins, and purportedly plays a role in the development of the hair follicle (Nakamura M, et al., FASEB J, 2003, 17(3):497-9; Patel K Intl J Biochem Cell Bio, 1998, 30:1087-93; Ueno N, et al., PNAS, 1987, 84:8282-86; Nakamura T, et al., Nature, 1990, 247:836-8; Iemura S, et al., PNAS, 1998, 77:649-52; Fainsod A, et al., Mech Dev, 1997, 63:39-50; Gamer L W, et al., Dev Biol, 1999, 208:222-32).

[0088] The deeply embedded end bulb, where local dermal-epidermal interactions drive active fiber growth, is the signaling center of the hair follicle comprising a cluster of mesencgymal cells, called the dermal papilla (DP). This same region is also central to the tissue remodeling and developmental changes involved in the hair fiber's or appendage's precise alternation between growth and regression phases. The DP, a key player in these activities, appears to orchestrate the complex program of differentiation that characterizes hair fiber formation from the primitive germinative epidermal cell source (Oliver R F, J Soc Cosmet Chem, 1971, 22:741-755; Oliver R F and C A Jahoda, Biology of Wool and Hair (eds Roger et al.), 1971, Cambridge University Press:51-67; Reynolds A J and C A Jahoda, Development, 1992, 115:587-593; Reynolds A J, et al., J Invest Dermatol, 1993, 101:634-38).

[0089] The lowermost dermal sheath (DS) arises below the basal stalk of the papilla, from where it curves outwards and upwards. This dermal sheath then externally encases the layers of the epidermal hair matrix as a thin layer of tissue and continues upward for the length of the follicle. The epidermally-derived outer root sheath (ORS) also continues for the length of the follicle, which lies immediately internal to the dermal sheath in between the two layers, and forms a specialized basement membrane termed the glassy membrane. The outer root sheath constitutes little more than an epidermal monolayer in the lower follicle, but becomes increasingly thickened as it approaches the surface. The inner root sheath (IRS) forms a mold for the developing hair shaft. It comprises three parts: the Henley layer, the Huxley layer, and the cuticle, with the cuticle being the innermost portion that touches the hair shaft. The IRS cuticle layer is a single cell thick and is located adjacent to the hair fiber. It closely interdigitates with the hair fiber cuticle layer. The Huxley layer can comprise up to four cell layers. The IRS Henley layer is the single cell layer that runs adjacent to the ORS layer (Ross M H, Histology: A text and atlas, 3^{rd} edition, Williams and Wilkins, 1995: Chapter 14; Burkitt H G, et al, Wheater's Functional Histology. 3^{rd} Edition, Churchill Livingstone, 1996: Chapter 9).

[0090] Alopecia Areata

[0091] Alopecia areata (AA) is one of the most prevalent autoimmune diseases, affecting approximately 4.6 million people in the US alone, including males and females across all ethnic groups, with a lifetime risk of 1.7%.^{A1} In AA, autoimmunity develops against the hair follicle, resulting in non-scarring hair loss that may begin as patches, which can coalesce and progress to cover the entire scalp (alopecia totalis, AT) or eventually the entire body (alopecia universalis, AU) (FIG. 1). AA was first described by Cornelius Celsus in 30 A.D., using the term “ophiasis”, which means “snake”, due to the sinuous path of hair loss as it spread slowly across the scalp. Hippocrates first used the Greek word ‘alopekia’ (fox mange), the modern day term “alopecia areata” was first used by Sauvages in his Nosologica Medica, published in 1760 in Lyons, France.

[0092] Curiously, AA affects pigmented hair follicles in the anagen (growth) phase of the hair cycle, and when the hair regrows in patches of AA, it frequently grows back white or colorless. The phenomenon of ‘sudden whitening of the hair’ is therefore ascribed to AA with an acute onset, and has been documented throughout history as having affected several prominent individuals at times of profound grief, stress or fear.^{A2} Examples include Shahjahan, who upon the death of his wife in 1631 experienced acute whitening of his hair, and in his grief built the Taj Mahal in her honor. Sir Thomas More, author of Utopia, who on the eve of his execution in 1535 was said to have become ‘white in both beard and hair’. The sudden whitening of the hair is believed to result from an acute attack upon the pigmented hair follicles, leaving behind the white hairs unscathed.

[0093] Several clinical aspects of AA remain unexplained but may hold important clues toward understanding pathogenesis. AA attacks hairs only around the base of the hair follicles, which are surrounded by dense clusters of lymphocytes, resulting in the pathognomic ‘swarm of bees’ appearance on histology. Based on these observations, and without being bound by theory, a signal(s) in the pigmented, anagen hair follicle is emitted invoking an acute or chronic immune response against the lower end of the hair follicle, leading to hair cycle perturbation, acute hair shedding, hair shaft anomalies, and hair breakage. Despite these perturbations in the hair follicle, there is no permanent organ destruction and the possibility of hair regrowth remains if immune privilege can be restored.

[0094] Throughout history, AA has been considered at times to be a neurological disease brought on by stress or anxiety, or as a result of an infectious agent, or even hormonal dysfunction. The concept of a genetically-determined autoimmune mechanism as the basis for AA emerged during the 20^{th} century from multiple lines of evidence. AA hair follicles exhibit an immune infiltrate with activated Th, Tc and NK cells^{A3,A4} and there is a shift from a suppressive (Th2) to an autoimmune (Th1) cytokine response. The humanized model of AA, which involves transfer of AA patient scalp onto immune-deficient SCID mice illustrates the autoimmune nature of the disease, since transfer of donor T-cells causes hair loss only when co-cultured with hair follicle or human melanoma homogenate.^{A5,A6} Regulatory T cells which serve to maintain immune tolerance are observed in lower numbers in AA tissue,^{A7} and transfer of these cells to C3H/HeJ mice leads to resistance to AA.^{A8} Although AA has long been considered exclusively as a T-cell mediated disease, in recent years, an additional mechanism of disease has been discussed. The hair follicle is defined as one of a select few immune privileged sites in the body, characterized by the presence of extracellular matrix barriers to impede immune cell trafficking, lack of antigen presenting cells, and inhibition of NK cell activity via the local production of immunosuppressive factors and reduced levels of MHC class I expression.^{A9} Thus, the notion of a ‘collapse of immune privilege’ has also been invoked as part of the mechanism by which AA may arise. Support for a genetic basis for AA comes from multiple lines of evidence, including the observed heritability in first degree relatives,^{A10, A11} twin studies,^{A12} and most recently, from the results of our family-based linkage studies.^{A13}

[0095] Hair Loss Disorder Gene Cohort (HLDGC)

[0096] This invention provides for the discovery that a number human genes have, for the first time, been identified as a cohort of genes involved in hair loss disorders. These genes were identified as having particular single-nucleotide polymorphisms where the presence of such particular polymorphism was correlated with the presence of a hair loss disorder in a subject. These genes, now that they have been identified, can be used for a variety of useful methods; for example, they can be used to determine whether a subject has susceptibility to Alopecia Areata (AA). The genes identified as part of this hair loss disorder gene cohort or group (i.e., “HLDGC genes”) include CTLA-4, IL-2, IL-21, IL-2RA/CD25, IKZF4, a HLA Region residing gene, PTGER4, PRDX5, STX17, NKG2D, ULBP6, ULBP3, HDAC4, CACNA2D3, IL-13, IL-6, CHCHD3, CSMD1, IFNG, IL-26, KIAA0350 (CLEC16A), SOCS1, ANKRD12, and PTPN2. In one embodiment, a HLA Region residing gene is selected from the group consisting of a gene of the HLA Class I Region, a gene of the HLA Class II Region, PTPN22, and AIRE. In one embodiment, the HLA Class I Region gene is HLA-A, HLA-B, HLA-C, HLA-G, HLA-DQB1, HLA-DRB1, MICA, MICB, or NOTCH4. In one embodiment, the HLA Class II Region gene is HLA-DOB, HLA-DQA1, HLA-DQA2, HLA-DQB2, TAP2, or HLA-DRA.

[0097] In one embodiment, the invention provides methods to diagnose a hair loss disorder or methods to treat a hair loss disorder comprising use of nucleic acids or proteins encoded by nucleic acids of the following HLDGC genes here discovered to be associated with alopecia areata: CTLA-4, IL-2, IL-21, IL-2RA/CD25, IKZF4, a HLA Region residing gene, PTGER4, PRDX5, STX17, NKG2D, ULBP6, ULBP3, HDAC4, CACNA2D3, IL-13, IL-6, CHCHD3, CSMD1, IFNG, IL-26, KIAA0350 (CLEC16A), SOCS1, ANKRD12, and PTPN2. For example, a HLDGC protein can be the human CTLA-4 protein (e.g., having the amino acid sequence shown in SEQ ID NO: 1); the human IL-2 protein (e.g., having the amino acid sequence shown in SEQ ID NO: 3); the human IL-2RA/CD25 protein (e.g., having the amino acid sequence shown in SEQ ID NO: 5); the human IKZF4 protein (e.g., having the amino acid sequence shown in SEQ ID NO: 7); the human PTGER4 protein (e.g., having the amino acid sequence shown in SEQ ID NO: 9); the human PRDX5 protein (e.g., having the amino acid sequence shown in SEQ ID NO: 11); the human STX17 protein (e.g., having the amino acid sequence shown in SEQ ID NO: 13); the human NKG2D protein (e.g., having the amino acid sequence shown in SEQ ID NO: 15); the human ULBP6 protein (e.g., having the amino acid sequence shown in SEQ ID NO: 17); the human ULBP3 protein (e.g., having the amino acid sequence shown in SEQ ID NO: 19); the human IL-21 protein (e.g., having the amino acid sequence shown in SEQ ID NO: 21); or a human HLA Class II Region protein, such as HLA-DQA2 (e.g., having the amino acid sequence shown in SEQ ID NO: 23). In one embodiment, a HLA Region residing gene is selected from the group consisting of a gene of the HLA Class I Region, a gene of the HLA Class II Region, PTPN22, and AIRE. In one embodiment, the HLA Class I Region gene is HLA-A, HLA-B, HLA-C, HLA-DQB1, HLA-DRB1, MICA, and NOTCH4. In one embodiment, the HLA Class II Region gene is HLA-DOB, HLA-DQA1, HLA-DQA2, HLA-DQB2, and HLA-DRA.

[0098] In some embodiments, the invention encompasses methods for using HLDGC proteins encoded by a nucleic acid (including, for example, genomic DNA, complementary DNA (cDNA), synthetic DNA, as well as any form of corresponding RNA). For example, a HLDGC protein can be encoded by a recombinant nucleic acid of a HLDGC gene, such as CTLA-4, IL-2, IL-21, IL-2RA/CD25, IKZF4, a HLA Region residing gene, PTGER4, PRDX5, STX17, NKG2D, ULBP6, ULBP3, HDAC4, CACNA2D3, IL-13, IL-6, CHCHD3, CSMD1, IFNG, IL-26, KIAA0350 (CLEC16A), SOCS1, ANKRD12, or PTPN2. In one embodiment, a HLA Region residing gene is selected from the group consisting of a gene of the HLA Class I Region, a gene of the HLA Class II Region, PTPN22, and AIRE. In one embodiment, the HLA Class I Region gene is HLA-A, HLA-B, HLA-C, HLA-DQB1, HLA-DRB1, MICA, MICB, HLA-G, or NOTCH4. In one embodiment, the HLA Class II Region gene is HLA-DOB, HLA-DQA1, HLA-DQA2, HLA-DQB2, TAP2, or HLA-DRA. The HLDGC proteins of the invention can be obtained from various sources and can be produced according to various techniques known in the art. For example, a nucleic acid that encodes a HLDGC protein can be obtained by screening DNA libraries, or by amplification from a natural source. A HLDGC protein can include a fragment or portion of human CTLA-4 protein, IL-2, IL-21 protein, IL-2RA/CD25 protein, IKZF4 protein, a HLA Region residing protein, PTGER4 protein, PRDX5 protein, STX17 protein, NKG2D protein, ULBP6 protein, ULBP3 protein, HDAC4 protein, CACNA2D3 protein, IL-13 protein, IL-6 protein, CHCHD3 protein, CSMD1 protein, IFNG protein, IL-26 protein, KIAA0350 (CLEC16A) protein, SOCS1 protein, ANKRD12 protein, or PTPN2 protein. The nucleic acids encoding HLDGC proteins of the invention can be produced via recombinant DNA technology and such recombinant nucleic acids can be prepared by conventional techniques, including chemical synthesis, genetic engineering, enzymatic techniques, or a combination thereof. Non-limiting examples of a HLDGC protein is the polypeptide encoded by either the nucleic acid having the nucleotide sequence shown in SEQ ID NO: 2, 4, 6, 8, 10, 12, 14, 16, 18, 20, 22, or 24.

[0099] In another embodiment, the invention encompasses orthologs of a human HLDGC protein, such as CTLA-4, IL-2, IL-21, IL-2RA/CD25, IKZF4, a protein encoded by a HLA Region residing gene, PTGER4, PRDX5, STX17, NKG2D, ULBP6, ULBP3, HDAC4, CACNA2D3, IL-13, IL-6, CHCHD3, CSMD1, IFNG, IL-26, KIAA0350 (CLEC16A), SOCS1, ANKRD12, and PTPN2. In one embodiment, a HLA Region residing gene is selected from the group consisting of a gene of the HLA Class I Region, a gene of the HLA Class II Region, PTPN22, and AIRE. In one embodiment, the HLA Class I Region gene is HLA-A, HLA-B, HLA-C, HLA-DQB1, HLA-DRB1, MICA, MICB, HLA-G, or NOTCH4. In one embodiment, the HLA Class II Region gene is HLA-DOB, HLA-DQA1, HLA-DQA2, HLA-DQB2, TAP2, or HLA-DRA. For example, an HLDGC protein can encompass the ortholog in mouse, rat, non-human primates, canines, goat, rabbit, porcine, bovine, chickens, feline, and horses. In one embodiment, the invention encompasses a protein encoded by a nucleic acid sequence homologous to the human nucleic acid, wherein the nucleic acid is found in a different species and wherein that homolog encodes a protein similar to a protein encoded by a HLDGC gene, such as CTLA-4, IL-2, IL-21, IL-2RA/CD25, IKZF4, a HLA Region residing protein, PTGER4, PRDX5, STX17, NKG2D, ULBP6, ULBP3, HDAC4, CACNA2D3, IL-13, IL-6, CHCHD3, CSMD1, IFNG, IL-26, KIAA0350 (CLEC16A), SOCS1, ANKRD12, and PTPN2. In some embodiments, the invention provides methods to treat a hair loss disorder in non-human animals (i.e., treating pet mange). The method can comprise using orthologs of a human HLDGC protein or nucleic acids encoding the same.

[0100] In some embodiments, the invention encompasses use of variants of an HLDGC protein, such as CTLA-4, IL-2, IL-21, IL-2RA/CD25, IKZF4, a HLA Region residing gene, PTGER4, PRDX5, STX17, NKG2D, ULBP6, ULBP3, HDAC4, CACNA2D3, IL-13, IL-6, CHCHD3, CSMD1, IFNG, IL-26, KIAA0350 (CLEC16A), SOCS1, ANKRD12, and PTPN2. Such a variant can comprise a naturally-occurring variant due to allelic variations between individuals (e.g., polymorphisms), mutated alleles related to hair growth, density, or pigmentation, or alternative splicing forms.

[0101] In one embodiment, the invention encompasses methods for using a protein or polypeptide encoded by a nucleic acid sequence of a Hair Loss Disorder Gene Cohort (HLDGC) gene, such as the sequence shown in SEQ ID NO: 1, 3, 5, 7, 9, 11, 13, 15, 17, 19, 21 or 23. In another embodiment, the polypeptide can be modified, such as by glycosylations and/or acetylations and/or chemical reaction or coupling, and can contain one or several non-natural or synthetic amino acids. An example of a HLDGC polypeptide has the amino acid sequence shown in SEQ ID NO: 1, 3, 5, 7, 9, 11, 13, 15, 17, 19, 21, or 23. In certain embodiments, the invention encompasses variants of a human protein encoded by a Hair Loss Disorder Gene Cohort (HLDGC) gene, such as CTLA-4, IL-2, IL-21, IL-2RA/CD25, IKZF4, a HLA Region residing gene, PTGER4, PRDX5, STX17, NKG2D, ULBP6, ULBP3, HDAC4, CACNA2D3, IL-13, IL-6, CHCHD3, CSMD1, IFNG, IL-26, KIAA0350 (CLEC16A), SOCS1, ANKRD12, and PTPN2. Such variants can include those having at least from about 46% to about 50% identity to SEQ ID NO: 1, 3, 5, 7, 9, 11, 13, 15, 17, 19, 21, or 23, or having at least from about 50.1% to about 55% identity to SEQ ID NO: 1, 3, 5, 7, 9, 11, 13, 15, 17, 19, 21, or 23, or having at least from about 55.1% to about 60% identity to SEQ ID NO: 1, 3, 5, 7, 9, 11, 13, 15, 17, 19, 21, or 23, or having from at least about 60.1% to about 65% identity to SEQ ID NO: 1, 3, 5, 7, 9, 11, 13, 15, 17, 19, 21, or 23, or having from about 65.1% to about 70% identity to SEQ ID NO: 1, 3, 5, 7, 9, 11, 13, 15, 17, 19, 21, or 23, or having at least from about 70.1% to about 75% identity to SEQ ID NO: 1, 3, 5, 7, 9, 11, 13, 15, 17, 19, 21, or 23, or having at least from about 75.1% to about 80% identity to SEQ ID NO: 1, 3, 5, 7, 9, 11, 13, 15, 17, 19, 21, or 23, or having at least from about 80.1% to about 85% identity to SEQ ID NO: 1, 3, 5, 7, 9, 11, 13, 15, 17, 19, 21, or 23, or having at least from about 85.1% to about 90% identity to SEQ ID NO: 1, 3, 5, 7, 9, 11, 13, 15, 17, 19, 21, or 23, or having at least from about 90.1% to about 95% identity to SEQ ID NO: 1, 3, 5, 7, 9, 11, 13, 15, 17, 19, 21, or 23, or having at least from about 95.1% to about 97% identity to SEQ ID NO: 1, 3, 5, 7, 9, 11, 13, 15, 17, 19, 21, or 23, or having at least from about 97.1% to about 99% identity to SEQ ID NO: 1, 3, 5, 7, 9, 11, 13, 15, 17, 19, 21, or 23.

[0102] The polypeptide sequence of human CTLA4 is depicted in SEQ ID NO: 1. The nucleotide sequence of human CTLA4 is shown in SEQ ID NO: 2. Sequence information related to CTLA4 is accessible in public databases by GenBank Accession numbers NM_{—}005214 (for mRNA) and NP_{—}005205 (for protein).

[0103] CTLA4, also known as CD152, is a member of the immunoglobulin superfamily, which is expressed on the surface of Helper T cells. CTLA4 is similar to the T-cell costimulatory protein CD28. Both CTLA4 and CD28 molecules bind to CD80 and CD86 on antigen-presenting cells. CTLA4 transmits an inhibitory signal to T cells, while CD28 transmits a stimulatory signal. (Yamada R, Ymamoto K. Mutat Res. 2005 Jun. 3; 573(1-2):136-51; and Gough S C, Walker L S, Sansom D M. Immunol Rev. 2005 April; 204:102-150).

[0104] SEQ ID NO: 1 is the human wild type amino acid sequence corresponding to CTLA4 (residues 1-223):

| | |
|---|---|
| 1 | MACLGFQRHK AQLNLATRTW PCTLLFFLLF IPVFCKAMHV AQPAVVLASS RGIASFVCEY |
| 61 | ASPGKATEVR VTVLRQADSQ VTEVCAATYM MGNELTFLDD SICTGTSSGN QVNLTIQGLR |
| 121 | AMDTGLYICK VELMYPPPYY LGIGNGTQIY VIDPEPCPDS DFLLWILAAV SSGLFFYSFL |
| 181 | LTAVSLSKML KKRSPLTTGV YVKMPPTEPE CEKQFQPYFI PIN |

[0105] SEQ ID NO: 2 is the human wild type nucleotide sequence corresponding to CTLA4 (nucleotides 1-1988), wherein the underscored bolded “ATG” denotes the beginning of the open reading frame:

| | |
|---|---|
| 1 | gccttctgtg tgtgcacatg tgtaatacat atctgggatc aaagctatct atataaagtc |
| 61 | cttgattctg tgtgggttca aacacatttc aaagcttcag gatcctgaaa ggttttgctc |
| 121 | tacttcctga agacctgaac accgctccca taaagccatg gcttgccttg gatttcagcg |
| 181 | gcacaaggct cagctgaacc tggctaccag gacctggccc tgcactctcc tgttttttct |
| 241 | tctcttcatc cctgtcttct gcaaagcaat gcacgtggcc cagcctgctg tggtactggc |
| 301 | cagcagccga ggcatcgcca gctttgtgtg tgagtatgca tctccaggca aagccactga |
| 361 | ggtccgggtg acagtgcttc ggcaggctga cagccaggtg actgaagtct gtgcggcaac |
| 421 | ctacatgatg gggaatgagt tgaccttcct agatgattcc atctgcacgg gcacctccag |
| 481 | tggaaatcaa gtgaacctca ctatccaagg actgagggcc atggacacgg gactctacat |
| 541 | ctgcaaggtg gagctcatgt acccaccgcc atactacctg ggcataggca acggaaccca |
| 601 | gatttatgta attgatccag aaccgtgccc agattctgac ttcctcctct ggatccttgc |
| 661 | agcagttagt tcggggttgt ttttttatag ctttctcctc acagctgttt ctttgagcaa |
| 721 | aatgctaaag aaaagaagcc ctcttacaac aggggtctat gtgaaaatgc ccccaacaga |
| 781 | gccagaatgt gaaaagcaat ttcagcctta ttttattccc atcaattgag aaaccattat |
| 841 | gaagaagaga gtccatattt caatttccaa gagctgaggc aattctaact tttttgctat |
| 901 | ccagctattt ttatttgttt gtgcatttgg ggggaattca tctctcttta atataaagtt |
| 961 | ggatgcggaa cccaaattac gtgtactaca atttaaagca aaggagtaga aagacagagc |
| 1021 | tgggatgttt ctgtcacatc agctccactt tcagtgaaag catcacttgg gattaatatg |
| 1081 | gggatgcagc attatgatgt gggtcaagga attaagttag ggaatggcac agcccaaaga |
| 1141 | aggaaaaggc agggagcgag ggagaagact atattgtaca caccttatat ttacgtatga |
| 1201 | gacgtttata gccgaaatga tcttttcaag ttaaatttta tgccttttat ttcttaaaca |
| 1261 | aatgtatgat tacatcaagg cttcaaaaat actcacatgg ctatgtttta gccagtgatg |
| 1321 | ctaaaggttg tattgcatat atacatatat atatatatat atatatatat atatatatat |
| 1381 | atatatatat atatatatat tttaatttga tagtattgtg catagagcca cgtatgtttt |
| 1441 | tgtgtatttg ttaatggttt gaatataaac actatatggc agtgtctttc caccttgggt |
| 1501 | cccagggaag ttttgtggag gagctcagga cactaataca ccaggtagaa cacaaggtca |
| 1561 | tttgctaact agcttggaaa ctggatgagg tcatagcagt gcttgattgc gtggaattgt |
| 1621 | gctgagttgg tgttgacatg tgctttgggg cttttacacc agttcctttc aatggtttgc |
| 1681 | aaggaagcca cagctggtgg tatctgagtt gacttgacag aacactgtct tgaagacaat |
| 1741 | ggcttactcc aggagaccca caggtatgac cttctaggaa gctccagttc gatgggccca |
| 1801 | attcttacaa acatgtggtt aatgccatgg acagaagaag gcagcaggtg gcagaatggg |
| 1861 | gtgcatgaag gtttctgaaa attaacactg cttgtgtttt taactcaata ttttccatga |
| 1921 | aaatgcaaca acatgtataa tatttttaat taaataaaaa tctgtggtgg tcgttttaaa |
| 1981 | aaaaaaaa |

[0106] The polypeptide sequence of human IL-2 is depicted in SEQ ID NO: 3. The nucleotide sequence of human IL-2 is shown in SEQ ID NO: 4. Sequence information related to IL-2 is accessible in public databases by GenBank Accession numbers NM_{—}000586 (for mRNA) and NP_{—}000577 (for protein).

[0107] Interleukin-2 (IL-2) is a cytokine produced by the body in an immune response to a foreign agent (an antigen), such as a microbial infection. IL-2 is involved in discriminating between foreign (non-self) and self. (See Rochman Y, Spolski R, Leonard W J. Nat Rev Immunol. 2009 July; 9(7):480-90; and Overwijk W W, Schluns K S. Clin Immunol. August; 132(2):153-65).

[0108] SEQ ID NO: 3 is the human wild type amino acid sequence corresponding to IL-2 (residues 1-153):

[0109] 1 MYRMQLLSCI ALSLALVTNS APTSSSTKKT QLQLEHLLLD LQMILNGINN YKNPKLTRML

[0110] 61 TFKFYMPKKA TELKHLQCLE EELKPLEEVL NLAQSKNFHL RPRDLISNIN VIVLELKGSE

[0111] 121 TTFMCEYADE TATIVEFLNR WITFCQSIIS TLT

[0112] SEQ ID NO: 4 is the human wild type nucleotide sequence corresponding to IL-2 (nucleotides 1-822), wherein the underscored bolded “ATG” denotes the beginning of the open reading frame:

| | |
|---|---|
| 1 | agttccctat cactctcttt aatcactact cacagtaacc tcaactcctg ccacaatgta |
| 61 | caggatgcaa ctcctgtctt gcattgcact aagtcttgca cttgtcacaa acagtgcacc |
| 121 | tacttcaagt tctacaaaga aaacacagct acaactggag catttactgc tggatttaca |
| 181 | gatgattttg aatggaatta ataattacaa gaatcccaaa ctcaccagga tgctcacatt |
| 241 | taagttttac atgcccaaga aggccacaga actgaaacat cttcagtgtc tagaagaaga |
| 301 | actcaaacct ctggaggaag tgctaaattt agctcaaagc aaaaactttc acttaagacc |
| 361 | cagggactta atcagcaata tcaacgtaat agttctggaa ctaaagggat ctgaaacaac |
| 421 | attcatgtgt gaatatgctg atgagacagc aaccattgta gaatttctga acagatggat |
| 481 | taccttttgt caaagcatca tctcaacact gacttgataa ttaagtgctt cccacttaaa |
| 541 | acatatcagg ccttctattt atttaaatat ttaaatttta tatttattgt tgaatgtatg |
| 601 | gtttgctacc tattgtaact attattctta atcttaaaac tataaatatg gatcttttat |
| 661 | gattcttttt gtaagcccta ggggctctaa aatggtttca cttatttatc ccaaaatatt |
| 721 | tattattatg ttgaatgtta aatatagtat ctatgtagat tggttagtaa aactatttaa |
| 781 | taaatttgat aaatataaaa aaaaaaaaaa aaaaaaaaaa aa |

[0113] The polypeptide sequence of human IL-2RA is depicted in SEQ ID NO: 5. The nucleotide sequence of human IL-2RA/CD25 is shown in SEQ ID NO: 6. Sequence information related to IL-2RA is accessible in public databases by GenBank Accession numbers NM_{—}000417 (for mRNA) and NP_{—}000408 (for protein).

[0114] IL-2RA, type I transmembrane protein, is the receptor for the alpha chain of Interleukin-2 (IL-2) that is present on activated T cells and activated B cells. In combination with IL-2RB and IL-2RG, it forms the heterotrimeric IL-2 receptor (Waldmann T A. J Clin Immunol. 2002 March; 22(2):51-6).

[0115] SEQ ID NO: 5 is the human wild type amino acid sequence corresponding to IL-2RA/CD25 (residues 1-272):

| | |
|---|---|
| 1 | MDSYLLMWGL LTFIMVPGCQ AELCDDDPPE IPHATFKAMA YKEGTMLNCE CKRGFRRIKS |
| 61 | GSLYMLCTGN SSHSSWDNQC QCTSSATRNT TKQVTPQPEE QKERKTTEMQ SPMQPVDQAS |
| 121 | LPGHCREPPP WENEATERIY HFVVGQMVYY QCVQGYRALH RGPAESVCKM THGKTRWTQP |
| 181 | QLICTGEMET SQFPGEEKPQ ASPEGRPESE TSCLVTTTDF QIQTEMAATM ETSIFTTEYQ |
| 241 | VAVAGCVFLL ISVLLLSGLT WQRRQRKSRR TI |

[0116] SEQ ID NO: 6 is the human wild type nucleotide sequence corresponding to IL-2RA/CD25 (nucleotides 1-2308), wherein the underscored bolded “ATG” denotes the beginning of the open reading frame:

| | |
|---|---|
| 1 | gagagactgg atggacccac aagggtgaca gcccaggcgg accgatcttc ccatcccaca |
| 61 | tcctccggcg cgatgccaaa aagaggctga cggcaactgg gccttctgca gagaaagacc |
| 121 | tccgcttcac tgccccggct ggtcccaagg gtcaggaaga tggattcata cctgctgatg |
| 181 | tggggactgc tcacgttcat catggtgcct ggctgccagg cagagctctg tgacgatgac |
| 241 | ccgccagaga tcccacacgc cacattcaaa gccatggcct acaaggaagg aaccatgttg |
| 301 | aactgtgaat gcaagagagg tttccgcaga ataaaaagcg ggtcactcta tatgctctgt |
| 361 | acaggaaact ctagccactc gtcctgggac aaccaatgtc aatgcacaag ctctgccact |
| 421 | cggaacacaa cgaaacaagt gacacctcaa cctgaagaac agaaagaaag gaaaaccaca |
| 481 | gaaatgcaaa gtccaatgca gccagtggac caagcgagcc ttccaggtca ctgcagggaa |
| 541 | cctccaccat gggaaaatga agccacagag agaatttatc atttcgtggt ggggcagatg |
| 601 | gtttattatc agtgcgtcca gggatacagg gctctacaca gaggtcctgc tgagagcgtc |
| 661 | tgcaaaatga cccacgggaa gacaaggtgg acccagcccc agctcatatg cacaggtgaa |
| 721 | atggagacca gtcagtttcc aggtgaagag aagcctcagg caagccccga aggccgtcct |
| 781 | gagagtgaga cttcctgcct cgtcacaaca acagattttc aaatacagac agaaatggct |
| 841 | gcaaccatgg agacgtccat atttacaaca gagtaccagg tagcagtggc cggctgtgtt |
| 901 | ttcctgctga tcagcgtcct cctcctgagt gggctcacct ggcagcggag acagaggaag |
| 961 | agtagaagaa caatctagaa aaccaaaaga acaagaattt cttggtaaga agccgggaac |
| 1021 | agacaacaga agtcatgaag cccaagtgaa atcaaaggtg ctaaatggtc gcccaggaga |
| 1081 | catccgttgt gcttgcctgc gttttggaag ctctgaagtc acatcacagg acacggggca |
| 1141 | gtggcaacct tgtctctatg ccagctcagt cccatcagag agcgagcgct acccacttct |
| 1201 | aaatagcaat ttcgccgttg aagaggaagg gcaaaaccac tagaactctc catcttattt |
| 1261 | tcatgtatat gtgttcatta aagcatgaat ggtatggaac tctctccacc ctatatgtag |
| 1321 | tataaagaaa agtaggttta cattcatctc attccaactt cccagttcag gagtcccaag |
| 1381 | gaaagcccca gcactaacgt aaatacacaa cacacacact ctaccctata caactggaca |
| 1441 | ttgtctgcgt ggttcctttc tcagccgctt ctgactgctg attctcccgt tcacgttgcc |
| 1501 | taataaacat ccttcaagaa ctctgggctg ctacccagaa atcattttac ccttggctca |
| 1561 | atcctctaag ctaaccccct tctactgagc cttcagtctt gaatttctaa aaaacagagg |
| 1621 | ccatggcaga ataatctttg ggtaacttca aaacggggca gccaaaccca tgaggcaatg |
| 1681 | tcaggaacag aaggatgaat gaggtcccag gcagagaatc atacttagca aagttttacc |
| 1741 | tgtgcgttac taattggcct ctttaagagt tagtttcttt gggattgcta tgaatgatac |
| 1801 | cctgaatttg gcctgcacta atttgatgtt tacaggtgga cacacaaggt gcaaatcaat |
| 1861 | gcgtacgttt cctgagaagt gtctaaaaac accaaaaagg gatccgtaca ttcaatgttt |
| 1921 | atgcaaggaa ggaaagaaag aaggaagtga agagggagaa gggatggagg tcacactggt |
| 1981 | agaacgtaac cacggaaaag agcgcatcag gcctggcacg gtggctcagg cctataaccc |
| 2041 | cagctcccta ggagaccaag gcgggagcat ctcttgaggc caggagtttg agaccagcct |
| 2101 | gggcagcata gcaagacaca tccctacaaa aaattagaaa ttggctggat gtggtggcat |
| 2161 | acgcctgtag tcctagccac tcaggaggct gaggcaggag gattgcttga gcccaggagt |
| 2221 | tcgaggctgc agtcagtcat gatggcacca ctgcactcca gcctgggcaa cagagcaaga |
| 2281 | tcctgtcttt aaggaaaaaa agacaagg |

[0117] The polypeptide sequence of human IKZF4 (IKAROS family zinc finger 4 (Eos)) is depicted in SEQ ID NO: 7. The nucleotide sequence of human IKZF4 is shown in SEQ ID NO: 8. Sequence information related to IKZF4 is accessible in public databases by GenBank Accession numbers NM_{—}022465 (for mRNA) and NP_{—}071910 (for protein).

[0118] IKZF4 is a zinc-finger protein that is a member of the Ikaros family of transcription factors. (John L B, Yoong S, Ward A C. J. Immunol. 2009 Apr. 15; 182(8):4792-9; and Perdomo J, Holmes M, Chong B, Crossley M. J Biol. Chem. 2000 Dec. 8; 275(49):38347-54).

[0119] SEQ ID NO: 7 is the human wild type amino acid sequence corresponding to IKZF4 (residues 1-585):

| | |
|---|---|
| 1 | MHTPPALPRR FQGGGRVRTP GSHRQGKDNL ERDPSGGCVP DFLPQAQDSN HFIMESLFCE |
| 61 | SSGDSSLEKE FLGAPVGPSV STPNSQHSSP SRSLSANSIK VEMYSDEESS RLLGPDERLL |
| 121 | EKDDSVIVED SLSEPLGYCD GSGPEPHSPG GIRLPNGKLK CDVCGMVCIG PNVLMVHKRS |
| 181 | HTGERPFHCN QCGASFTQKG NLLRHIKLHS GEKPFKCPFC NYACRRRDAL TGHLRTHSVS |
| 241 | SPTVGKPYKC NYCGRSYKQQ STLEEHKERC HNYLQSLSTE AQALAGQPGD EIRDLEMVPD |
| 301 | SMLHSSSERP TFIDRLANSL TKRKRSTPQK FVGEKQMRFS LSDLPYDVNS GGYEKDVELV |
| 361 | AHHSLEPGFG SSLAFVGAEH LRPLRLPPTN CISELTPVIS SVYTQMQPLP GRLELPGSRE |
| 421 | AGEGPEDLAD GGPLLYRPRG PLTDPGASPS NGCQDSTDTE SNHEDRVAGV VSLPQGPPPQ |
| 481 | PPPTIVVGRH SPAYAKEDPK PQEGLLRGTP GPSKEVLRVV GESGEPVKAF KCEHCRILFL |
| 541 | DHVMFTIHMG CHGFRDPFEC NICGYHSQDR YEFSSHIVRG EHKVG |

[0120] SEQ ID NO: 8 is the human wild type nucleotide sequence corresponding to IKZF4 (nucleotides 1-5506), wherein the underscored bolded “ATG” denotes the beginning of the open reading frame:

| | |
|---|---|
| 1 | gaagctgtcc gtgtcctggg ccccatgacc tctggggcct tggcttcccc agctggcaga |
| 61 | ggattgggcc ttccctaggg cccccccttt ctccctccca cccgcaggcc catccatctc |
| 121 | tctctctctc tcttgcacac actcttgcct ctctcaggca tttgttgtgc agttcctctt |
| 181 | tgtctgctgg gcacgagggg caacagcatc tgcctttccc tccctgtgca cacacccacc |
| 241 | acccaccccc ttcactgtct tggaaaaggg atgctgtagc ctagcatctc ccccactata |
| 301 | tacacatata cattctctcc agccccctcc ccaagcacat ccaagcgtgc tctcccctct |
| 361 | ccttctctcc ctctctctct ctctctctct cacacacaca cacacacaca cactcaacac |
| 421 | acatacaccc tgggctgagc tgctcttgct ggctgcagcc gtgggcctct gctcaccgtg |
| 481 | ccgctgctgc tgcctgcgaa atgacggcgg ttcccctcac ttccaggaat ccacgcttcc |
| 541 | tggaaggtga gtggctgggc tcacccctgc ctgccactga gacgcagaca tgcatacacc |
| 601 | acccgcactc cctcgccgtt tccaaggcgg cggccgcgtt cgcaccccag ggtctcaccg |
| 661 | gcaagggaag gataatctgg agagggatcc ctcaggaggg tgtgttccgg atttcttgcc |
| 721 | tcaggcccaa gactccaacc attttataat ggaatcttta ttttgtgaaa gtagcgggga |
| 781 | ctcatctctg gagaaggagt tcctcggggc cccagtgggg ccctcggtga gcacccccaa |
| 841 | cagccagcac tcttctccta gccgctcact cagtgccaac tccatcaagg tggagatgta |
| 901 | cagcgatgag gagtcaagca gactgctggg gccagatgag cggctcctgg aaaaggacga |
| 961 | cagcgtgatt gtggaagatt cattgtctga gcccctgggc tactgtgatg ggagtgggcc |
| 1021 | agagcctcac tcccctgggg gcatccggct gcccaatggc aagctcaagt gtgacgtctg |
| 1081 | cggcatggtc tgtattggac ccaacgtgct catggtgcac aagcgcagtc acactggtga |
| 1141 | aaggcccttc cattgcaacc agtgtggtgc ctccttcacc cagaagggga acctgctgcg |
| 1201 | ccacatcaag ctgcactctg gggagaagcc ctttaaatgt cccttctgca actatgcctg |
| 1261 | ccgccggcgt gatgcactca ctggtcacct ccgcacacac tcagtctcct ctcccacagt |
| 1321 | gggcaagccc tacaagtgta actactgtgg ccggagctac aaacagcaga gtaccctgga |
| 1381 | ggagcacaag gagcggtgcc ataactacct acagagtctc agcactgaag cccaagcttt |
| 1441 | ggctggccaa ccaggtgacg aaatacgtga cctggagatg gtgccagact ccatgctgca |
| 1501 | ctcatcctct gagcggccaa ctttcatcga tcgtctggcc aatagcctca ccaaacgcaa |
| 1561 | gcgttccaca ccccagaagt ttgtaggcga aaagcagatg cgcttcagcc tctcagacct |
| 1621 | cccctatgat gtgaactcgg gtggctatga aaaggatgtg gagttggtgg cacaccacag |
| 1681 | cctagagcct ggctttggaa gttccctggc ctttgtgggt gcagagcatc tgcgtcccct |
| 1741 | ccgccttcca cccaccaatt gcatctcaga actcacgcct gtcatcagct ctgtctacac |
| 1801 | ccagatgcag cccctccctg gtcgactgga gcttccagga tcccgagaag caggtgaggg |
| 1861 | acctgaggac ctggctgatg gaggtcccct cctctaccgg ccccgaggcc ccctgactga |
| 1921 | ccctggggca tcccccagca atggctgcca ggactccaca gacacagaaa gcaaccacga |
| 1981 | agatcgggtt gcgggggtgg tatccctccc tcagggtccc ccaccccagc cacctcccac |
| 2041 | cattgtggtg ggccggcaca gtcctgccta cgccaaagag gaccccaagc cacaggaggg |
| 2101 | gttattgcgg ggcaccccag gcccctccaa ggaagtgctt cgggtggtgg gcgagagtgg |
| 2161 | tgagcctgtg aaggccttca agtgtgagca ctgccgtatc ctcttcctgg accacgtcat |
| 2221 | gttcactatc cacatgggct gccatggctt cagagaccct tttgagtgca acatctgtgg |
| 2281 | ttatcacagc caggaccggt acgaattctc ttcccacatt gtccgggggg agcataaggt |
| 2341 | gggctagcaa cctctccctc tctcctcagt ccaccactcc actgccctga ctacaggcat |
| 2401 | tgatccctgt ccccaccatt tcccaaggag ttttgctttg tagccctcac tactggccac |
| 2461 | ctgacctcac acctgaccct gacccctcct cacctattct cttcctctat cctgaccgat |
| 2521 | gtaagcattg tgatgaaaca gatcttttgc ttatgttttt cctttttatc ttctctcatc |
| 2581 | ccagcatact gagttattta ttaattagtt gatttatttt tgccttttta aattttaact |
| 2641 | tatatcagtc acttgccact cccccaccct cctgtccaca actcctttcc actttaggcc |
| 2701 | aatttttctc tcttagatct tccagcagcc ccaggggtag gaagctcctc ttagtactaa |
| 2761 | gagacttcaa gcttcttgct ttaagtcctc accctttaca ttatctaatt cttcagtttt |
| 2821 | gatgctgata cctgcccccg gccctacctt agctctgtgg cattatatct cctctctggg |
| 2881 | actcttcaac ctggtactcc atacctcttg tgccctctca ctttaggcag cttgcactat |
| 2941 | tcttgaatga atgaagaatt atttcctcat ttggaagtag gagggactga agaaattctc |
| 3001 | cccaggcact gtgggactga gagtcctatt cccctagtaa taggtcatat tcccctagta |
| 3061 | atatgagttc tcaaagccta cattcaggat ctccctctag gatgtgatag atctggtccc |
| 3121 | tctccttgaa ctacccctcc acacgctcta gtcccttcaa cctaccggtc tattaagtgg |
| 3181 | tggcttttct ctccttggag tgccccaatt ttatattctc aggggccaag gctaggtctg |
| 3241 | caaccctctg tctctgacag attgggagcc acaggtgcct aattgggaac cagggcatgg |
| 3301 | gaaaggagtg ggtcaaaatt cttctctttc tcctccacct ctcaaacttc ttcactatag |
| 3361 | tgaccttcct aggctctcag gggctccttc agtccccatc ctatgagaaa ctagtgggtt |
| 3421 | gctgcctgat gacaaggggt tgtttcagcc cctcagtcat gctgccttct gctgctccct |
| 3481 | cccagcagga ttcaccctct cattcccggg ctcctgggcc ctgttcttag gatcagtggc |
| 3541 | agggagaaac gggtatctct tttctctctt ctaattttca gtataaccaa aaattatccc |
| 3601 | agcatgagca cgggcacgtg cccttcaccc cattccaccc ttgttccagc aagactggga |
| 3661 | tgggtacaac tgaactgggg tcttccttta ctaccccctt ctacactcag ctcccagaca |
| 3721 | cagggtagga ggggggactg ctggctactg cagagaccct tggctatttg agtaacctag |
| 3781 | gattagtgag aaggggcaga aggagataca actccactgc aagtggaggt ttctttctac |
| 3841 | aagagttttc tgcccaaggc cacagccatc ccactctctg cttccttgag attcaaacca |
| 3901 | aaggctgttt ttctatgttt aaagaaaaaa aaaagtaaaa accaaacaca acacctcaca |
| 3961 | agttgtaact cttggtcctt ctctctctcc ttttctcttc ccttccttcc ccttccatct |
| 4021 | ttctttccac atgtcctttc cttattggct cttttacctc ctacttttct cactccctat |
| 4081 | cagggatatt ttgggggggg atggtaaagg gtgggctaag gaacagaccc tgggattagg |
| 4141 | gccttaaggg ctctgagagg agtctacctt gccttcttat gggaagggag accctaaaaa |
| 4201 | actttctcct ctttgtcctc ctttttctcc cccactctga ggtttcccca agagaaccag |
| 4261 | attggcaggg agaagcattg tggggcaatt gttcctcctt gacaatgtag caataaatag |
| 4321 | atgctgccaa gggcagaaaa tggggaggtt agctcagagc agagtagtct ctagagaaag |
| 4381 | gaagaatcct caacggcacc ctggggtgct agctcctttt tagaatgtca gcagagctga |
| 4441 | gattaatatc tgggcttttc ctgaactatt ctggttattg agcccttcct gttagaccta |
| 4501 | ccgcctccca cctcttctgt gtctgctgtg tatttggtga cacttcataa ggactagtcc |
| 4561 | cttctggggt atcagagcct tagggtgccc ccatcccctt ccccagtcaa ctgtggcacc |
| 4621 | tgtaacctcc cggaacatga aggactatgc tctgaggcta tactctgtgc ccatgagagc |
| 4681 | agagactgga agggcaagac caggtgctaa ggaggggaga gggggcatcc tgtctctctc |
| 4741 | cagaccatca ctgcacttta accagggtct taggtacaaa atcctacttt tcagagcctt |
| 4801 | ccagctctgg aacctcaaac atcctcatgc tctctcccag ctccttttgc ataaaaaaaa |
| 4861 | aagtaaagaa aaagaaaaaa aaatacacac acactgaaac ccacatggag aaaagaggtg |
| 4921 | tttcctttta tattgctatt caaaatcaat accaccaaca aaatatttct aagtagacac |
| 4981 | ttttccagac ctttgttttt ttgtgtcagt gtccaagctg cagataggat tttgtaatac |
| 5041 | ttctggcagc ttctttcctt gtgtacataa tatatatata tacatatata tatatatttt |
| 5101 | taatcagaag ttatgaagaa caaaaagaaa aaataaacac agaagcaagt gcaataccac |
| 5161 | ctctcttctc cctctctcct agggtttcct ttgtagccta tgtttggtgt ctcttttgac |
| 5221 | ctttacccct tcacctcctc ctctcttctt ctgattcccc tccccccctt ttttaaagag |
| 5281 | tttttctcct ttctcaaggg gagttaaact agcttttgag acttattgca aagcattttg |
| 5341 | tatatgtaat atattgtaag taaatatttg tgtaacggag atatactact gtaagttttg |
| 5401 | tactgtactg gctgaaagtc tgttataaat aaacatgagt aatttaacac caaaaaaaaa |
| 5461 | aaaaaaaaaa aaaaaaaaaa aaaaaaaaaa aaaaaaaaaa aaaaaa |

[0121] The polypeptide sequence of human PTGER4 is depicted in SEQ ID NO: 9. The nucleotide sequence of human PTGER4 is shown in SEQ ID NO: 10. Sequence information related to PTGER4 is accessible in public databases by GenBank Accession numbers NM_{—}000958 (for mRNA) and NP_{—}000949 (for protein).

[0122] PTGER4 (prostaglandin E receptor 4) is a member of the G-protein coupled receptor family. It is one of four receptors identified for prostaglandin E2 (PGE2), and can activate T-cell factor signaling (Mum J, Alibert O, Wu N, Tendil S, Gidrol X. J Exp Med. 2008 Dec. 22; 205(13):3091-103).

[0123] SEQ ID NO: 9 is the human wild type amino acid sequence corresponding to PTGER4 (residues 1-488):

| | |
|---|---|
| 1 | MSTPGVNSSA SLSPDRLNSP VTIPAVMFIF GVVGNLVAIV VLCKSRKEQK ETTFYTLVCG |
| 61 | LAVTDLLGTL LVSPVTIATY MKGQWPGGQP LCEYSTFILL FFSLSGLSII CAMSVERYLA |
| 121 | INHAYFYSHY VDKRLAGLTL FAVYASNVLF CALPNMGLGS SRLQYPDTWC FIDWTTNVTA |
| 181 | HAAYSYMYAG FSSFLILATV LCNVLVCGAL LRMHRQFMRR TSLGTEQHHA AAAASVASRG |
| 241 | HPAASPALPR LSDFRRRRSF RRIAGAEIQM VILLIATSLV VLICSIPLVV RVFVNQLYQP |
| 301 | SLEREVSKNP DLQAIRIASV NPILDPWIYI LLRKTVLSKA IEKIKCLFCR IGGSRRERSG |
| 361 | QHCSDSQRTS SAMSGHSRSF ISRELKEISS TSQTLLPDLS LPDLSENGLG GRNLLPGVPG |
| 421 | MGLAQEDTTS LRTLRISETS DSSQGQDSES VLLVDEAGGS GRAGPAPKGS SLQVTFPSET |
| 481 | LNLSEKCI |

[0124] SEQ ID NO: 10 is the human wild type nucleotide sequence corresponding to PTGER4 (nucleotides 1-3432), wherein the underscored bolded “ATG” denotes the beginning of the open reading frame:

| | |
|---|---|
| 1 | gcgagagcgg agctccaagc ccggcagccc gagaggaaga tgaacagccc caggccagag |
| 61 | cctctggcag agtggacccc gagccgcccc caggtagcca ggagcggcct cagcggcagc |
| 121 | cgcaaactcc agtagccgcc cgtgctgccc gtggctgggg cggagggcag ccagagctgg |
| 181 | ggaccaaggc tccgcgccac ctgcgcgcac agcctcacac ctgaacgctg tcctcccgca |
| 241 | gacgagaccg gcgggcactg caaagctggg actcgtcttt gaaggaaaaa aaatagcgag |
| 301 | taagaaatcc agcaccattc ttcactgacc catcccgctg cacctcttgt ttcccaagtt |
| 361 | tttgaaagct ggcaactctg acctcggtgt ccaaaaatcg acagccactg agaccggctt |
| 421 | tgagaagccg aagatttggc agtttccaga ctgagcagga caaggtgaaa gcaggttgga |
| 481 | ggcgggtcca ggacatctga gggctgaccc tgggggctcg tgaggctgcc accgctgctg |
| 541 | ccgctacaga cccagccttg cactccaagg ctgcgcaccg ccagccacta tcatgtccac |
| 601 | tcccggggtc aattcgtccg cctccttgag ccccgaccgg ctgaacagcc cagtgaccat |
| 661 | cccggcggtg atgttcatct tcggggtggt gggcaacctg gtggccatcg tggtgctgtg |
| 721 | caagtcgcgc aaggagcaga aggagacgac cttctacacg ctggtatgtg ggctggctgt |
| 781 | caccgacctg ttgggcactt tgttggtgag cccggtgacc atcgccacgt acatgaaggg |
| 841 | ccaatggccc gggggccagc cgctgtgcga gtacagcacc ttcattctgc tcttcttcag |
| 901 | cctgtccggc ctcagcatca tctgcgccat gagtgtcgag cgctacctgg ccatcaacca |
| 961 | tgcctatttc tacagccact acgtggacaa gcgattggcg ggcctcacgc tctttgcagt |
| 1021 | ctatgcgtcc aacgtgctct tttgcgcgct gcccaacatg ggtctcggta gctcgcggct |
| 1081 | gcagtaccca gacacctggt gcttcatcga ctggaccacc aacgtgacgg cgcacgccgc |
| 1141 | ctactcctac atgtacgcgg gcttcagctc cttcctcatt ctcgccaccg tcctctgcaa |
| 1201 | cgtgcttgtg tgcggcgcgc tgctccgcat gcaccgccag ttcatgcgcc gcacctcgct |
| 1261 | gggcaccgag cagcaccacg cggccgcggc cgcctcggtt gcctcccggg gccaccccgc |
| 1321 | tgcctcccca gccttgccgc gcctcagcga ctttcggcgc cgccggagct tccgccgcat |
| 1381 | cgcgggcgcc gagatccaga tggtcatctt actcattgcc acctccctgg tggtgctcat |
| 1441 | ctgctccatc ccgctcgtgg tgcgagtatt cgtcaaccag ttatatcagc caagtttgga |
| 1501 | gcgagaagtc agtaaaaatc cagatttgca ggccatccga attgcttctg tgaaccccat |
| 1561 | cctagacccc tggatatata tcctcctgag aaagacagtg ctcagtaaag caatagagaa |
| 1621 | gatcaaatgc ctcttctgcc gcattggcgg gtcccgcagg gagcgctccg gacagcactg |
| 1681 | ctcagacagt caaaggacat cttctgccat gtcaggccac tctcgctcct tcatctcccg |
| 1741 | ggagctgaag gagatcagca gtacatctca gaccctcctg ccagacctct cactgccaga |
| 1801 | cctcagtgaa aatggccttg gaggcaggaa tttgcttcca ggtgtgcctg gcatgggcct |
| 1861 | ggcccaggaa gacaccacct cactgaggac tttgcgaata tcagagacct cagactcttc |
| 1921 | acagggtcag gactcagaga gtgtcttact ggtggatgag gctggtggga gcggcagggc |
| 1981 | tgggcctgcc cctaagggga gctccctgca agtcacattt cccagtgaaa cactgaactt |
| 2041 | atcagaaaaa tgtatataat aggcaaggaa agaaatacag tactgtttct ggacccttat |
| 2101 | aaaatcctgt gcaatagaca catacatgtc acatttagct gtgctcagaa gggctatcat |
| 2161 | catcctacaa ctcacattag agaacatcct ggcttttgag cacttttcaa acaatcaagt |
| 2221 | tgactcacgt gggtcctgag gcctgcagca cgtcggatgc taccccacta tgacagagga |
| 2281 | ttgtggtcac aacttgatgg ctgcgaagac ctaccctccg tttttctact agataggagg |
| 2341 | atggtagaag tttggctgct gtcataacat ccagagcttt gtcgtatttg gcacacagca |
| 2401 | gaggcccaga tattagaaag gctctattcc aataaactat gaggactgcc ttatggatga |
| 2461 | tttaagtgtc tcactaaagc atgaaatgtg aatttttatt gttgtacata cgatttaagg |
| 2521 | tatttaaagt attttcttct ctgtgagaag gtttattgtt aatacaaggt ataataaaat |
| 2581 | tatcgcaacc cctctccttc cagtataacc agctgaagtt gcagatgtta gatatttttc |
| 2641 | ataaacaagt tcgagtcaaa gttgaaaatt catagtaaga ttgatatcta taaaatagat |
| 2701 | ataaattttt aagagaaaga atttagtatt atcaaaggga taaagaaaaa aatactattt |
| 2761 | aagatgtgaa aattacagtc caaaatactg ttctttccag gctatgtata aaatacatag |
| 2821 | tgaaaattgt ttagtgatat tacatttatt tatccagaaa actgtgattt caggagaacc |
| 2881 | taacatgctg gtgaatattt tcaacttttt ccctcactaa ttggtacttt taaaaacata |
| 2941 | acataaattt tttgaagtct ttaataaata acccataatt gaagtgtata atataaaaaa |
| 3001 | ttttaaaaat ctaagcagct tattgtttct ctgaaagtgt gtgtagtttt actttcctaa |
| 3061 | ggaattacca agaatatcct ttaaaattta aaaggatggc aagttgcatc agaaagcttt |
| 3121 | attttgagat gtaaaaagat tcccaaacgt ggttacatta gccattcatg tatgtcagaa |
| 3181 | gtgcagaatt ggggcactta atggtcacct tgtaacagtt ttgtgtaact cccagtgatg |
| 3241 | ctgtacacat atttgaaggg tctttctcaa agaaatatta agcatgtttt gttgctcagt |
| 3301 | gtttttgtga attgcttggt tgtaattaaa ttctgagcct gatattgata tggttttaag |
| 3361 | aagcagttgt accaagtgaa attattttgg agattataat aaatatatac attcaaaaaa |
| 3421 | aaaaaaaaaa aa |

[0125] The polypeptide sequence of human PRDX5 is depicted in SEQ ID NO: 11. The nucleotide sequence of human PRDX5 is shown in SEQ ID NO: 12. Sequence information related to PRDX5 is accessible in public databases by GenBank Accession numbers NM_{—}012094 (for mRNA) and NP_{—}036226 (for protein).

[0126] PRDX5 (peroxiredoxin-5) is a member of the peroxiredoxin family of antioxidant enzymes. It has been reported to play an antioxidant protective role in different tissues under normal conditions and during inflammatory processes. This protein interacts with peroxisome receptor 1 (Nguyên-Nhu N T, et al., Biochim Biophys Acta. 2007 July-August; 1769(7-8):472-83).

[0127] SEQ ID NO: 11 is the human wild type amino acid sequence corresponding to PRDX5 (residues 1-214):

| | |
|---|---|
| 1 | MGLAGVCALR RSAGYILVGG AGGQSAAAAA RRCSEGEWAS GGVRSFSRAA AAMAPIKVGD |
| 61 | AIPAVEVFEG EPGNKVNLAE LFKGKKGVLF GVPGAFTPGC SKTHLPGFVE QAEALKAKGV |
| 121 | QVVACLSVND AFVTGEWGRA HKAEGKVRLL ADPTGAFGKE TDLLLDDSLV SIFGNRRLKR |
| 181 | FSMVVQDGIV KALNVEPDGT GLTCSLAPNI ISQL |

[0128] SEQ ID NO: 12 is the human wild type nucleotide sequence corresponding to PRDX5 (nucleotides 1-959), wherein the underscored bolded “ATG” denotes the beginning of the open reading frame:

| | |
|---|---|
| 1 | gcagtggagg cggcccaggc ccgccttccg cagggtgtcg ccgctgtgcc gctagcggtg |
| 61 | ccccgcctgc tgcggtggca ccagccagga ggcggagtgg aagtggccgt ggggcgggta |
| 121 | tgggactagc tggcgtgtgc gccctgagac gctcagcggg ctatatactc gtcggtgggg |
| 181 | ccggcggtca gtctgcggca gcggcagcaa gacggtgcag tgaaggagag tgggcgtctg |
| 241 | gcggggtccg cagtttcagc agagccgctg cagccatggc cccaatcaag gtgggagatg |
| 301 | ccatcccagc agtggaggtg tttgaagggg agccagggaa caaggtgaac ctggcagagc |
| 361 | tgttcaaggg caagaagggt gtgctgtttg gagttcctgg ggccttcacc cctggatgtt |
| 421 | ccaagacaca cctgccaggg tttgtggagc aggctgaggc tctgaaggcc aagggagtcc |
| 481 | aggtggtggc ctgtctgagt gttaatgatg cctttgtgac tggcgagtgg ggccgagccc |
| 541 | acaaggcgga aggcaaggtt cggctcctgg ctgatcccac tggggccttt gggaaggaga |
| 601 | cagacttatt actagatgat tcgctggtgt ccatctttgg gaatcgacgt ctcaagaggt |
| 661 | tctccatggt ggtacaggat ggcatagtga aggccctgaa tgtggaacca gatggcacag |
| 721 | gcctcacctg cagcctggca cccaatatca tctcacagct ctgaggccct gggccagatt |
| 781 | acttcctcca cccctcccta tctcacctgc ccagccctgt gctggggccc tgcaattgga |
| 841 | atgttggcca gatttctgca ataaacactt gtggtttgcg gccaaaaaaa aaaaaaaaaa |
| 901 | aaaaaaaaaa aaaaaaaaaa aaaaaaaaaa aaaaaaaaaa aaaaaaaaaa aaaaaaaaa |

[0129] The polypeptide sequence of human STX17 is depicted in SEQ ID NO: 13. The nucleotide sequence of human STX17 is shown in SEQ ID NO: 14. Sequence information related to STX17 is accessible in public databases by GenBank Accession numbers NM_{—}017919 (for mRNA) and NP_{—}060389 (for protein).

[0130] Syntaxin-17 (STX17) is a member of the syntaxin family and recently was reported to be a Ras-interacting protein (Südhof TC, Rothman J E. Science. 2009 Jan. 23; 323(5913):474-7; Zhang et al., J Histochem Cytochem. 2005 November; 53(11):1371-82; and Steegmaier, M., et al., J. Biol. Chem. 273 (51), 34171-34179 (1998)).

[0131] SEQ ID NO: 13 is the human wild type amino acid sequence corresponding to STX17 (residues 1-302):

| | |
|---|---|
| 1 | MSEDEEKVKL RRLEPAIQKF IKIVIPTDLE RLRKHQINIE KYQRCRIWDK LHEEHINAGR |
| 61 | TVQQLRSNIR EIEKLCLKVR KDDLVLLKRM IDPVKEEASA ATAEFLQLHL ESVEELKKQF |
| 121 | NDEETLLQPP LTRSMTVGGA FHTTEAEASS QSLTQIYALP EIPQDQNAAE SWETLEADLI |
| 181 | ELSQLVTDFS LLVNSQQEKI DSIADHVNSA AVNVEEGTKN LGKAAKYKLA ALPVAGALIG |
| 241 | GMVGGPIGLL AGFKVAGIAA ALGGGVLGFT GGKLIQRKKQ KMMEKLTSSC PDLPSQTDKK |
| 301 | CS |

[0132] SEQ ID NO: 14 is the human wild type nucleotide sequence corresponding to STX17 (nucleotides 1-6910), wherein the underscored bolded “ATG” denotes the beginning of the open reading frame:

| | |
|---|---|
| 1 | ctcgtgatgc cccgccccgt cgctcctgcg cctgcgccgt gcccaccgac cggcctcgag |
| 61 | cgccccggcg ggaggttttt ctatatgagt ggagaagaca gctgttacca gggaggtcat |
| 121 | acaacatttt tttaggatgt ctgaagatga agaaaaagtg aaattacgcc gtcttgaacc |
| 181 | agctatccag aaattcatta agatagtaat cccaacagac ctggaaaggt taagaaagca |
| 241 | ccagataaat attgagaagt atcaaaggtg cagaatctgg gacaagttgc atgaagagca |
| 301 | tatcaatgca ggacgtacag ttcagcaact ccgatccaat atccgagaaa ttgagaaact |
| 361 | ttgtttgaaa gtccgaaagg atgacctagt acttctgaag agaatgatag atcctgttaa |
| 421 | agaagaagca tcagcagcaa cagcagaatt tctccaactc catttggaat ctgtagaaga |
| 481 | acttaagaag caatttaatg atgaagaaac tttgctacag cctcctttga ccagatccat |
| 541 | gactgttggt ggagcatttc atactactga agctgaagct agttctcaga gtttgactca |
| 601 | gatatatgcc ttacctgaaa ttcctcaaga tcaaaatgct gcagaatcgt gggaaacctt |
| 661 | agaagcggac ttaattgaac ttagccaact ggtcactgac ttctctctcc tagtgaattc |
| 721 | tcagcaggag aagattgaca gcattgcaga ccatgtcaac agtgctgctg tgaatgttga |
| 781 | agagggaacc aaaaacttag ggaaggctgc aaaatacaag ctggcagctc tgcctgtggc |
| 841 | aggtgcactc atcgggggaa tggtaggggg tcctattggc ctccttgcag gcttcaaagt |
| 901 | ggcaggaatt gcagctgcac ttggtggtgg ggtgttgggc ttcacaggtg gaaaattgat |
| 961 | acaaagaaag aaacagaaaa tgatggagaa gctcacttcc agctgtccag atcttcccag |
| 1021 | ccaaactgac aagaaatgca gttaaaaacc aaatttcagt attattggtg ccaacatgtc |
| 1081 | tatcctgagg acctttgctg ctgttggaca ctccgtcacc ttttggaaca caagtatatc |
| 1141 | aagatagtgg ctactgatgt tcaagtggga ttgaagtgtg ataaatggat atattttgtt |
| 1201 | gtttgctggg gtgttcatgg agatgttaag agattgaggc cctgggctga gggtatataa |
| 1261 | tgtatgtcag gtaaagtttg aagactgcca aggagcagat tttctccctg gaaatgtgaa |
| 1321 | aactgaacct ataactctga taaggacttg agatgtgtag aaacgttggg ttatggaaga |
| 1381 | ctagtttctt ccataaccct gaattggaga ccttaatgct aagtgtagat tattgaggtt |
| 1441 | tgttagtgag gaaaagaata agagttcaga agcctttgtt atcagatagc gaaatcaggg |
| 1501 | cctagtgagg agcacaggtc gactacataa tggagtccat tggcgaaccc tattgcaatt |
| 1561 | tggtccaact atatcttctg gtgaaggaaa ttaatgatgt aagaaaatgc aagaggctca |
| 1621 | acttctcttc caaaaatctt ctggcttctg aactcttcct ctgcctctct ttaaataaat |
| 1681 | aacacagaat ttcaagtggt aggagactta ttaagccagt caccaagctt ggtctgtcag |
| 1741 | cctgtcttct aacacctcaa agatcttgtg ccctgtgctg tccctccctt gtaattatga |
| 1801 | aaagttcttt ggtttctggg gtgaattcta cccatgtata atgaggaatt ctctcataac |
| 1861 | cttttttgtc ttgtctgtca tctctgttca tcccttccta taacctctag gtaaaaagaa |
| 1921 | aagaaaaaaa gaaatttcga gatattttca acattgttag agtttgggct aaaatgagca |
| 1981 | aggagaaaaa aaccaccaag aacatttcct ggggcatgtt ccagttttga ggggtgatat |
| 2041 | atctgccaga tagggggtat ctgacccagt cttcttttca gctggtctct ggggggagct |
| 2101 | gagaactcgc ttgctacctc acatcctttt ccccagactt tttatctcct atgcatccct |
| 2161 | ttgctttcta tagctggtgt ttcttcccca aaatggcgtt cccatgctta cctttctcac |
| 2221 | attctagaca atgatggaca aagacgcatg caagactcag acccggggaa tggtgtggtg |
| 2281 | ctaatctcaa cacctgacat tcacagcaag catggcccag cccaactgca tgtctatctc |
| 2341 | aaaccgcaga aaggctttaa tactggaaaa aaagaattca agactacagg cagctcccct |
| 2401 | ctgtacccca actcatttaa aataggagga atcacttttt gccttactta acgctttttt |
| 2461 | ctgagcacag ggatgggcac ctgcacccca gaaggtgtga gctgtctctc tgccaggagc |
| 2521 | taaggttcat taggggattg gatggtttat cacttctttc tttctgagtt tacttttagt |
| 2581 | aacttttatt gatggctacc tttcatgtcc ctgtctaaag agactttctc tttcatacgt |
| 2641 | cttaaatctc atcaatgaaa tccagtgaaa cagcaccatt tcttagtatc attaaataac |
| 2701 | tagaaagtat caagtattgc tctctgctgc tttatatcat taacatatta ataataccaa |
| 2761 | gaaggaaata ctttgaataa gtgtcagatt ctgatccagt attggacacc tgtgatattg |
| 2821 | gacacctgtg aggctgggat aattactttt gaattacacc tcttctctag tttctggacc |
| 2881 | ttgctctgtc actttaacac agggtgatca aacctgaatg aggatcagaa ctcacccagg |
| 2941 | cacatactaa agcaagattc ctaaacctca gttccagggg taattctgac atcacccgtc |
| 3001 | cagcatagtc agctgaaatt ataaatctaa gaaacagtta catcaagatt ctgctgtgtc |
| 3061 | atttaattct gaaactccca gtattctacc cttcttcatc actgcatatt accccactct |
| 3121 | tccatcccaa attggctatc ctttcagccc accaacttag cggcagcact agggattcat |
| 3181 | tataaggtaa atctggttta cataaagacc tgaaggaggc ctgtatttga agctcacact |
| 3241 | tggtattggt atctctcatt tttactgagc cagtgtggaa taccactgta tgtactcata |
| 3301 | taagcccttg acttttactg ctcatcagga ttggaatatt actctagcag tcttcacaca |
| 3361 | taggcaagtt acagtccttt taaaaagtat ctcatttccc tataatggaa cctaatagcc |
| 3421 | aactttttca tagaaattgc tagaagagtt tgatcaacta taaatgataa agtgtttata |
| 3481 | agcatagtca gtgtgacaca gaaaccaatc ttaaaattga atttaatgtt ttatcatatc |
| 3541 | agattaaata ttttctccat gtcttatttt tactgcaaca agttagaaag tgggaacact |
| 3601 | ttgattaatg tcttaaaatt tgtgggccct catttggata aaggcagcaa tcctaaggac |
| 3661 | tttttttttt tttttaacat aatctgagaa tttctctgta gagcagagac tttcaaacct |
| 3721 | tttggctgta acccacagta aaaaacgcat ttatatcaaa ccttagaata tgtttaatga |
| 3781 | acaatactta ccattctgat gctttttatt gtttcagttt ttaaaatatg ccagttgcaa |
| 3841 | cccactaaat tgatatctac caatgggttg caacccttag cttgaaaaaa acaccctcac |
| 3901 | agaggaactg gtatttcttg aataccttct gtttgccagg cacttcacca ggcattttac |
| 3961 | aagtaaggaa actgggcttc agagaaaata atttgcagag gtttactcaa ctacaaaggg |
| 4021 | gtgaagccag gaatgttaac taggtctgtt gagctacaaa aacttttatg tctctcagac |
| 4081 | tatacagcct ctatacaaaa ttgagatggg ggttgggggc aggggctcat gcctgcaatc |
| 4141 | ccagcactta gggaggcaga ggccagagga tcacttgagc ccaggagttt gagaccagcc |
| 4201 | tgggcaacat agtgagactc ttgtctgtat gaaaaaaatt aagaattagc tgggtgtggc |
| 4261 | atagcacaca cctgtggtcc cagctacatg ggaagctgaa gtgggaggat cacttgaact |
| 4321 | caggagcagc cttggtgaca gaacaagacc ctctctcaaa aaaatattta aaaaaaggtg |
| 4381 | ggtcatccat tctcctttac caaacaggct ttgaaatgac acattccatt catttgcatc |
| 4441 | tttttaaaaa acttctgatt ccttactgag tgtccagcag cctcaaagtt tttaatggta |
| 4501 | gctgatgcag acataaacag tgctcaattt ggcccttaaa ctataaaatc aagaaagagt |
| 4561 | atttcaatcc catccacctg cctgcaagat ttcttaatgt tcactagtta taaccattgt |
| 4621 | ttaaacagtg ctttttgtgt aatttaaaaa taaactttaa tgctttttaa aacaaattta |
| 4681 | tcataattca tagatcaaat gattatcctt taaaatgata cccttgggaa atcatgtact |
| 4741 | tactgtagtg atgctagtat taatattact tagaccaatt ttgaaactgt tctttcagaa |
| 4801 | ttgcctccaa agacattttg cagatcatcc cagaaaaggg ggtatgatgg tgctgtgtag |
| 4861 | aactgaccag agttcctgga ggattttgag gttatactga aactgagtgc tgtacaggga |
| 4921 | gaattgcatg agtccagaaa cttccttctg tgggctgcct gccttcctgc cctcccttaa |
| 4981 | gtgctctaag atttttgtac aggagtaaga atcaaatact ggtaacatca atcacaagaa |
| 5041 | gttgaggaaa cctgtaatat agctagataa tatacaacgt ttgtcttcca tcagagtgca |
| 5101 | gaaaccaaac catgctttgt gttaacctta aatatgaaag gtgtttctca gggtcccctt |
| 5161 | tgtccttcgt tgctgccata tgaaatctta caaggaagga tgaggaaaag cctgggggga |
| 5221 | ggttctcctc ggaaatgagg tggttttttt tgttattaag tagaacgtgg ctgtggttca |
| 5281 | caggtactta acgaatgtta gatgatgttc ttaagtaatc agaggcctaa taaaaggcag |
| 5341 | gggagtttct cttctagcct aaattaatat taaaagttca ggggtatttt ttgtttttaa |
| 5401 | attaatactt tattgttttt aacaggtggt tctcataatt tacattcatt aatttgatgc |
| 5461 | ccttttacaa agaaacttct taggtattat aaaccatcaa tgtaaaggat ccacatggta |
| 5521 | tgtatccaca ttgctactct caaatagaaa tgggagataa gaaatatatc tgtgcaatat |
| 5581 | taaattgaaa aaaaaaaacc cataaaaagt gtcaaaggca aataatttgc tctagatcac |
| 5641 | aaaactagtt agcacaaggc taggattata accagggtct aggaaaaaat cctgaaggtg |
| 5701 | atttaactga gtgttaggcc ctgtcaagcc acctgctaag gctcatggtc tttcagacta |
| 5761 | gcttcaacat tccaaatcag gcaatagcta caacggaaag ataattggac ggggaatcct |
| 5821 | gagatcagag tcctagtttg gctttgtctc ttgtagcagg attttttaaa tcaggggcag |
| 5881 | ctctcttctc ccatcccagc catgaatctt tcaaccttag tggtcaccaa cttgactcca |
| 5941 | ttccttatat caagacttgt cctgtcaatt ctcccttaaa tgttagttgc atccatttct |
| 6001 | aaatatatcc atggccatca ccctagtaaa aagactatta cctcacaccc cgcacttgat |
| 6061 | cttcccccaa ctttaagtga ctcagttcct tatatcactg ccacaagaat taacaaccat |
| 6121 | gtccatcttt catttttctg ctgaaagatt ttcagtggtt cccactgaat accaaataaa |
| 6181 | gttcgaatcc cttagattgg cattcacagc cttctacgtt ctggccccag ctttatctct |
| 6241 | tgaaactcac tactcaccat ctgacaatgc cactaaaaat ccacaagagt gattttaagg |
| 6301 | tttttctatg gtgaaggttc aaactggtaa taaaccatgt ttacattttt ctggtctaaa |
| 6361 | ataatttcta tattacttta taatagtcag ctgggggtta tttaagctct tggacgagcc |
| 6421 | taaaacttgt atcctgaaga aaatattttt ttccaccaga agaaattgct ttcaatttct |
| 6481 | taaccttcaa aacaatgtca gtgttgtcac ctgtgcattt gatagccaca gcacaagtat |
| 6541 | tcttcaggag cataaatcct ccagccttga atggaccatt gtccagctcc tgtgaaaaac |
| 6601 | ttaatatttg agaaagacat tcaatggtac atgttttctg tacacttcat gagtagttga |
| 6661 | gattttcttg tattaaggtt aatcactaaa aaggtgttta cttgggtttc gttaactaaa |
| 6721 | ccccctaaag atgttttcca ttttattgtt aaacacttgg tgttagcaag ggtcagcacg |
| 6781 | agaaaaggcc caatggcaag aatttctgca aactctgtaa agcttactga attcatttgt |
| 6841 | catttattac attgctgagt ggtgcttgaa taaggaaaca tgcaataaat ttacttattt |
| 6901 | aaccaacaaa |

[0133] The polypeptide sequence of human NKG2D is depicted in SEQ ID NO: 15. The nucleotide sequence of human NKG2D is shown in SEQ ID NO: 16. Sequence information related to NKG2D is accessible in public databases by GenBank Accession numbers NM_{—}007360 (for mRNA) and NP_{—}031386 (for protein).

[0134] NKG2-D type II integral membrane protein (NKG2D) is a protein encoded by the KLRK1 (killer cell lectin-like receptor subfamily K, member 1) gene. KLRK1 has also been designated as CD314. (Nausch N, Cerwenka A. Oncogene. 2008 Oct. 6; 27(45):5944-58; and González S, et al., Trends Immunol. 2008 August; 29(8):397-403).

[0135] SEQ ID NO: 15 is the human wild type amino acid sequence corresponding to NKG2D (residues 1-216):

| | |
|---|---|
| 1 | MGWIRGRRSR HSWEMSEFHN YNLDLKKSDF STRWQKQRCP VVKSKCRENA SPFFFCCFIA |
| 61 | VAMGIRFIIM VTIWSAVFLN SLFNQEVQIP LTESYCGPCP KNWICYKNNC YQFFDESKNW |
| 121 | YESQASCMSQ NASLLKVYSK EDQDLLKLVK SYHWMGLVHI PTNGSWQWED GSILSPNLLT |
| 181 | IIEMQKGDCA LYASSFKGYI ENCSTPNTYI CMQRTV |

[0136] SEQ ID NO: 16 is the human wild type nucleotide sequence corresponding to NKG2D (nucleotides 1-1593), wherein the underscored bolded “ATG” denotes the beginning of the open reading frame:

| | |
|---|---|
| 1 | actttcaatt ctagatcagg aactgaggac atatctaaat tttctagttt tatagaaggc |
| 61 | ttttatccac aagaatcaag atcttccctc tctgagcagg aatcctttgt gcattgaaga |
| 121 | ctttagattc ctctctgcgg tagacgtgca cttataagta tttgatgggg tggattcgtg |
| 181 | gtcggaggtc tcgacacagc tgggagatga gtgaatttca taattataac ttggatctga |
| 241 | agaagagtga tttttcaaca cgatggcaaa agcaaagatg tccagtagtc aaaagcaaat |
| 301 | gtagagaaaa tgcatctcca ttttttttct gctgcttcat cgctgtagcc atgggaatcc |
| 361 | gtttcattat tatggtaaca atatggagtg ctgtattcct aaactcatta ttcaaccaag |
| 421 | aagttcaaat tcccttgacc gaaagttact gtggcccatg tcctaaaaac tggatatgtt |
| 481 | acaaaaataa ctgctaccaa ttttttgatg agagtaaaaa ctggtatgag agccaggctt |
| 541 | cttgtatgtc tcaaaatgcc agccttctga aagtatacag caaagaggac caggatttac |
| 601 | ttaaactggt gaagtcatat cattggatgg gactagtaca cattccaaca aatggatctt |
| 661 | ggcagtggga agatggctcc attctctcac ccaacctact aacaataatt gaaatgcaga |
| 721 | agggagactg tgcactctat gcctcgagct ttaaaggcta tatagaaaac tgttcaactc |
| 781 | caaatacgta catctgcatg caaaggactg tgtaaagatg atcaaccatc tcaataaaag |
| 841 | ccaggaacag agaagagatt acaccagcgg taacactgcc aactgagact aaaggaaaca |
| 901 | aacaaaaaca ggacaaaatg accaaagact gtcagatttc ttagactcca caggaccaaa |
| 961 | ccatagaaca atttcactgc aaacatgcat gattctccaa gacaaaagaa gagagatcct |
| 1021 | aaaggcaatt cagatatccc caaggctgcc tctcccacca caagcccaga gtggatgggc |
| 1081 | tgggggaggg gtgctgtttt aatttctaaa ggtaggacca acacccaggg gatcagtgaa |
| 1141 | ggaagagaag gccagcagat cactgagagt gcaaccccac cctccacagg aaattgcctc |
| 1201 | atgggcaggg ccacagcaga gagacacagc atgggcagtg ccttccctgc ctgtgggggt |
| 1261 | catgctgcca cttttaatgg gtcctccacc caacggggtc agggaggtgg tgctgcccca |
| 1321 | gtgggccatg attatcttaa aggcattatt ctccagcctt aagtaagatc ttaggacgtt |
| 1381 | tcctttgcta tgatttgtac ttgcttgagt cccatgactg tttctcttcc tctctttctt |
| 1441 | ccttttggaa tagtaatatc catcctatgt ttgtcccact attgtatttt ggaagcacat |
| 1501 | aacttgtttg gtttcacagg ttcacagtta agaaggaatt ttgcctctga ataaatagaa |
| 1561 | tcttgagtct catgcaaaaa aaaaaaaaaa aaa |

[0137] The polypeptide sequence of human ULBP6 is depicted in SEQ ID NO: 17. The nucleotide sequence of human ULBP6 is shown in SEQ ID NO: 18. Sequence information related to ULBP6 is accessible in public databases by GenBank Accession numbers NM_{—}130900 (for mRNA) and NP_{—}570970 (for protein).

[0138] ULBP6 is also referred to as RAET1L. It is a ligand that activates the immunoreceptor NKG2D and is involved in NK cell activation (Eagle et al., Eur J. Immunol. 2009 Aug. 5).

[0139] SEQ ID NO: 17 is the human wild type amino acid sequence corresponding to ULBP6 (residues 1-246):

| | |
|---|---|
| 1 | MAAAAIPALL LCLPLLFLLF GWSRARRDDP HSLCYDITVI PKFRPGPRWC AVQGQVDEKT |
| 61 | FLHYDCGNKT VTPVSPLGKK LNVTMAWKAQ NPVLREVVDI LTEQLLDIQL ENYTPKEPLT |
| 121 | LQARMSCEQK AEGHSSGSWQ FSIDGQTFLL FDSEKRMWTT VHPGARKMKE KWENDKDVAM |
| 181 | SFHYISMGDC IGWLEDFLMG MDSTLEPSAG APLAMSSGTT QLRATATTLI LCCLLIILPC |
| 241 | FILPGI |

[0140] SEQ ID NO: 18 is the human wild type nucleotide sequence corresponding to ULBP6 (nucleotides 1-802), wherein the underscored bolded “ATG” denotes the beginning of the open reading frame:

| | |
|---|---|
| 1 | gatttcatct tccaggatcc accttgatta aatctcttgt ccccagccct cctggtcccc |
| 61 | aatggcagca gccgccatcc cagctttgct tctgtgcctc ccgcttctgt tcctgctgtt |
| 121 | cggctggtcc cgggctaggc gagacgaccc tcactctctt tgctatgaca tcaccgtcat |
| 181 | ccctaagttc agacctggac cacggtggtg tgcggttcaa ggccaggtgg atgaaaagac |
| 241 | ttttcttcac tatgactgtg gcaacaagac agtcacaccc gtcagtcccc tggggaagaa |
| 301 | actaaatgtc acaatggcct ggaaagcaca gaacccagta ctgagagagg tggtggacat |
| 361 | acttacagag caactgcttg acattcagct ggagaattac acacccaagg aacccctcac |
| 421 | cctgcaggca aggatgtctt gtgagcagaa agctgaagga cacagcagtg gatcttggca |
| 481 | gttcagtatc gatggacaga ccttcctact ctttgactca gagaagagaa tgtggacaac |
| 541 | ggttcatcct ggagccagaa agatgaaaga aaagtgggag aatgacaagg atgtggccat |
| 601 | gtccttccat tacatctcaa tgggagactg cataggatgg cttgaggact tcttgatggg |
| 661 | catggacagc accctggagc caagtgcagg agcaccactc gccatgtcct caggcacaac |
| 721 | ccaactcagg gccacagcca ccaccctcat cctttgctgc ctcctcatca tcctcccctg |
| 781 | cttcatcctc cctggcatct ga |

[0141] The polypeptide sequence of human ULBP3 is depicted in SEQ ID NO: 19. The nucleotide sequence of human ULBP3 is shown in SEQ ID NO: 20. Sequence information related to ULBP3 is accessible in public databases by GenBank Accession numbers NM_{—}024518 (for mRNA) and NP_{—}078794 (for protein).

[0142] ULBP3 (UL16 binding protein 3) is a ligand that activates the immunoreceptor NKG2D and is involved in NK cell activation (Sun, P. D., Immunol Res. 2003; 27(2-3):539-48).

[0143] SEQ ID NO: 19 is the human wild type amino acid sequence corresponding to ULBP3 (residues 1-244):

| | |
|---|---|
| 1 | MAAAASPAIL PRLAILPYLL FDWSGTGRAD AHSLWYNFTI IHLPRHGQQW CEVQSQVDQK |
| 61 | NFLSYDCGSD KVLSMGHLEE QLYATDAWGK QLEMLREVGQ RLRLELADTE LEDFTPSGPL |
| 121 | TLQVRMSCEC EADGYIRGSW QFSFDGRKFL LFDSNNRKWT VVHAGARRMK EKWEKDSGLT |
| 181 | TFFKMVSMRD CKSWLRDFLM HRKKRLEPTA PPTMAPGLAQ PKAIATTLSP WSFLIILCFI |
| 241 | LPGI |

[0144] SEQ ID NO: 20 is the human wild type nucleotide sequence corresponding to ULBP3 (nucleotides 1-735), wherein the underscored bolded “ATG” denotes the beginning of the open reading frame:

| | |
|---|---|
| 1 | atggcagcgg ccgccagccc cgcgatcctt ccgcgcctcg cgattcttcc gtacctgcta |
| 61 | ttcgactggt ccgggacggg gcgggccgac gctcactctc tctggtataa cttcaccatc |
| 121 | attcatttgc ccagacatgg gcaacagtgg tgtgaggtcc agagccaggt ggatcagaag |
| 181 | aattttctct cctatgactg tggcagtgac aaggtcttat ctatgggtca cctagaagag |
| 241 | cagctgtatg ccacagatgc ctggggaaaa caactggaaa tgctgagaga ggtggggcag |
| 301 | aggctcagac tggaactggc tgacactgag ctggaggatt tcacacccag tggacccctc |
| 361 | acgctgcagg tcaggatgtc ttgtgagtgt gaagccgatg gatacatccg tggatcttgg |
| 421 | cagttcagct tcgatggacg gaagttcctc ctctttgact caaacaacag aaagtggaca |
| 481 | gtggttcacg ctggagccag gcggatgaaa gagaagtggg agaaggatag cggactgacc |
| 541 | accttcttca agatggtctc aatgagagac tgcaagagct ggcttaggga cttcctgatg |
| 601 | cacaggaaga agaggctgga acccacagca ccacccacca tggccccagg cttagctcaa |
| 661 | cccaaagcca tagccaccac cctcagtccc tggagcttcc tcatcatcct ctgcttcatc |
| 721 | ctccctggca tctga |

[0145] The polypeptide sequence of human IL-21 is depicted in SEQ ID NO: 21. The nucleotide sequence of human IL-21 is shown in SEQ ID NO: 22. Sequence information related to IL-21 is accessible in public databases by GenBank Accession numbers NM_{—}021803 (for mRNA) and NP_{—}068575 (for protein).

[0146] Interleukin 21 is a cytokine that regulates cells of the immune system, including natural killer (NK) cells and cytotoxic T cells. This cytokine induces cell division/proliferation in its target cells. (See Rochman Y, Spolski R, Leonard W J. Nat Rev Immunol. 2009 July; 9(7):480-90; Monteleone, G. et al., Cytokine Growth Factor Rev. 2009 April; 20(2):185-91; and Overwijk W W, Schluns K S. Clin Immunol. 2009 August; 132(2):153-65).

[0147] SEQ ID NO: 21 is the human wild type amino acid sequence corresponding to IL-21 (residues 1-162):

| | |
|---|---|
| 1 | MRSSPGNMER IVICLMVIFL GTLVHKSSSQ GQDRHMIRMR QLIDIVDQLK NYVNDLVPEF |
| 61 | LPAPEDVETN CEWSAFSCFQ KAQLKSANTG NNERIINVSI KKLKRKPPST NAGRRQKHRL |
| 121 | TCPSCDSYEK KPPKEFLERF KSLLQKMIHQ HLSSRTHGSE DS |

[0148] SEQ ID NO: 22 is the human wild type nucleotide sequence corresponding to IL-IL-21 (nucleotides 1-616), wherein the underscored bolded “ATG” denotes the beginning of the open reading frame:

| | |
|---|---|
| 1 | ctgaagtgaa aacgagacca aggtctagct ctactgttgg tacttatgag atccagtcct |
| 61 | ggcaacatgg agaggattgt catctgtctg atggtcatct tcttggggac actggtccac |
| 121 | aaatcaagct cccaaggtca agatcgccac atgattagaa tgcgtcaact tatagatatt |
| 181 | gttgatcagc tgaaaaatta tgtgaatgac ttggtccctg aatttctgcc agctccagaa |
| 241 | gatgtagaga caaactgtga gtggtcagct ttttcctgct ttcagaaggc ccaactaaag |
| 301 | tcagcaaata caggaaacaa tgaaaggata atcaatgtat caattaaaaa gctgaagagg |
| 361 | aaaccacctt ccacaaatgc agggagaaga cagaaacaca gactaacatg cccttcatgt |
| 421 | gattcttatg agaaaaaacc acccaaagaa ttcctagaaa gattcaaatc acttctccaa |
| 481 | aagatgattc atcagcatct gtcctctaga acacacggaa gtgaagattc ctgaggatct |
| 541 | aacttgcagt tggacactat gttacatact ctaatatagt agtgaaagtc atttctttgt |
| 601 | attccaagtg gaggag |

[0149] The polypeptide sequence of a human HLA Class II Region protein, such as HLA-DQA2 is depicted in SEQ ID NO: 23. The nucleotide sequence of a human HLA Class II Region protein, such as HLA-DQA2 is shown in SEQ ID NO: 24. Sequence information related to HLA Class II Region proteins, such as HLA-DQA2 is accessible in public databases by GenBank Accession numbers NM_{—}020056 (for mRNA) and NP_{—}064440 (for protein).

[0150] SEQ ID NO: 23 is the human wild type amino acid sequence corresponding to HLA-DQA2 (residues 1-255):

| | |
|---|---|
| 1 | MILNKALLLG ALALTAVMSP CGGEDIVADH VASYGVNFYQ SHGPSGQYTH EFDGDEEFYV |
| 61 | DLETKETVWQ LPMFSKFISF DPQSALRNMA VGKHTLEFMM RQSNSTAATN EVPEVTVFSK |
| 121 | FPVTLGQPNT LICLVDNIFP PVVNITWLSN GHSVTEGVSE TSFLSKSDHS FFKISYLTFL |
| 181 | PSADEIYDCK VEHWGLDEPL LKHWEPEIPA PMSELTETLV CALGLSVGLM GIVVGTVFII |
| 241 | QGLRSVGASR HQGLL |

[0151] SEQ ID NO: 24 is the human wild type nucleotide sequence corresponding to HLA-DQA2 (nucleotides 1-1709), wherein the underscored bolded “ATG” denotes the beginning of the open reading frame:

| | |
|---|---|
| 1 | tcctcacaat tgctctacag ctcagagcag caactgctga ggctgccttg ggaagaagat |
| 61 | gatcctaaac aaagctctgc tgctgggggc cctcgccctg actgccgtga tgagcccctg |
| 121 | tggaggtgaa gacattgtgg ctgaccatgt tgcctcctat ggtgtgaact tctaccagtc |
| 181 | tcacggtccc tctggccagt acacccatga atttgatgga gacgaggagt tctatgtgga |
| 241 | cctggagacg aaagagactg tctggcagtt gcctatgttt agcaaattta taagttttga |
| 301 | cccgcagagt gcactgagaa atatggctgt gggaaaacac accttggaat tcatgatgag |
| 361 | acagtccaac tctaccgctg ccaccaatga ggttcctgag gtcacagtgt tttccaagtt |
| 421 | tcctgtgacg ctgggtcagc ccaacaccct catctgtctt gtggacaaca tctttcctcc |
| 481 | tgtggtcaac atcacctggc tgagcaatgg gcactcagtc acagaaggtg tttctgagac |
| 541 | cagcttcctc tccaagagtg atcattcctt cttcaagatc agttacctca ccttcctccc |
| 601 | ttctgctgat gagatttatg actgcaaggt ggagcactgg ggcctggacg agcctcttct |
| 661 | gaaacactgg gagcctgaga ttccagcccc tatgtcagag ctcacagaga ctttggtctg |
| 721 | cgccctgggg ttgtctgtgg gcctcatggg cattgtggtg ggcactgtct tcatcatcca |
| 781 | aggcctgcgt tcagttggtg cttccagaca ccaagggctc ttatgaatcc catcctgaaa |
| 841 | aggaaggtgc atcaccatct acaggagaag aagaatggac ttgctaaatg acctagcact |
| 901 | attctctggc ctgatttatc atatcccttt tctcctccaa atgtttcttc tctcacctct |
| 961 | tctctgggac ttaaggtgct atattccctc agagctcaca aatgcctttc aattctttcc |
| 1021 | ctgacctcct ttcctgaatt tttttatttt ctcaaatgtt acctactaag ggatgcctgg |
| 1081 | gtaagccact cagctaccta attcctcaat gacctttatc taaaatctcc atggaagcaa |
| 1141 | taaattccct tttgatgcct ctattgaatt tttcccatct ttcatctcag ggctgactga |
| 1201 | gagcataact tagaatgggc gactcttatg ttttaggcca atttcatatc attccccaga |
| 1261 | tcatatttca agtccagtaa cacaggagca accaagtaca gtgtatcctg ataatttgtt |
| 1321 | gatttcttaa ctggtgttaa tatttctttc ttccttttgt tcctaccctt ggccactgcc |
| 1381 | agccacccct caattcaggt accaacgaac cctctgccct tggctcagaa tggttatagc |
| 1441 | agaaatacaa aaaaaaaaaa aaagtctgta ctaatttcaa tatggctctt aaaaggaatg |
| 1501 | acagagaaat aggatacaag aattttgaat ctcaaaagtt atcaaaagta aaaaattttg |
| 1561 | ttaccaaaag tcaaactgca ttctcaaaac tttaaatttg tgaagaatga caacagtaga |
| 1621 | agctttcctc tccccttctc accttgagga gataaaaatt ctctaggcag gaaaagaaat |
| 1681 | ggaagccagt tagaaaaaca ttgaaataa |

[0152] Overexpression of 2 or more HLDGC genes described above can affect hair growth or density regulation and pigmentation.

[0153] DNA and Amino Acid Manipulation Methods and Purification Thereof

[0154] The present invention utilizes conventional molecular biology, microbiology, and recombinant DNA techniques available to one of ordinary skill in the art. Such techniques are well known to the skilled worker and are explained fully in the literature. See, e.g., “DNA Cloning: A Practical Approach,” Volumes 1 and II (D. N. Glover, ed., 1985); “Oligonucleotide Synthesis” (M. J. Gait, ed., 1984); “Nucleic Acid Hybridization” (B. D. Hames & S. J. Higgins, eds., 1985); “Transcription and Translation” (B. D. Hames & S. J. Higgins, eds., 1984); “Animal Cell Culture” (R. I. Freshney, ed., 1986); “Immobilized Cells and Enzymes” (IRL Press, 1986): B. Perbal, “A Practical Guide to Molecular Cloning” (1984), and Sambrook, et al., “Molecular Cloning: a Laboratory Manual” (3^{rd} ed. 2001).

[0155] One skilled in the art can obtain a protein encoded by a HLDGC gene, such as CTLA-4, IL-2, IL-21, IL-2RA/CD25, IKZF4, an HLA Region residing gene, PTGER4, PRDX5, STX17, NKG2D, ULBP6, ULBP3, HDAC4, CACNA2D3, IL-13, IL-6, CHCHD3, CSMD1, IFNG, IL-26, KIAA0350 (CLEC16A), SOCS1, ANKRD12, or PTPN2, or a variant thereof, in several ways, which include, but are not limited to, isolating the protein via biochemical means or expressing a nucleotide sequence encoding the protein of interest by genetic engineering methods.

[0156] The invention provides for methods for using a nucleic acid encoding a HLDGC protein or variants thereof. In one embodiment, the nucleic acid is expressed in an expression cassette, for example, to achieve overexpression in a cell. The nucleic acids of the invention can be an RNA, cDNA, cDNA-like, or a DNA of interest in an expressible format, such as an expression cassette, which can be expressed from the natural promoter or an entirely heterologous promoter. The nucleic acid of interest can encode a protein, and may or may not include introns.

[0157] Protein variants can include amino acid sequence modifications. For example, amino acid sequence modifications fall into one or more of three classes: substitutional, insertional or deletional variants. Insertions can include amino and/or carboxyl terminal fusions as well as intrasequence insertions of single or multiple amino acid residues. Insertions ordinarily will be smaller insertions than those of amino or carboxyl terminal fusions, for example, on the order of one to four residues. Deletions are characterized by the removal of one or more amino acid residues from the protein sequence. These variants ordinarily are prepared by site-specific mutagenesis of nucleotides in the DNA encoding the protein, thereby producing DNA encoding the variant, and thereafter expressing the DNA in recombinant cell culture.

[0158] Techniques for making substitution mutations at predetermined sites in DNA having a known sequence are well known, for example M13 primer mutagenesis and PCR mutagenesis. Amino acid substitutions can be single residues, but can occur at a number of different locations at once. In one non-limiting embodiment, insertions can be on the order of about from 1 to about 10 amino acid residues, while deletions can range from about 1 to about 30 residues. Deletions or insertions can be made in adjacent pairs (for example, a deletion of about 2 residues or insertion of about 2 residues). Substitutions, deletions, insertions, or any combination thereof can be combined to arrive at a final construct. The mutations cannot place the sequence out of reading frame and should not create complementary regions that can produce secondary mRNA structure. Substitutional variants are those in which at least one residue has been removed and a different residue inserted in its place.

[0159] Substantial changes in function or immunological identity are made by selecting residues that differ more significantly in their effect on maintaining (a) the structure of the polypeptide backbone in the area of the substitution, for example as a sheet or helical conformation, (b) the charge or hydrophobicity of the molecule at the target site or (c) the bulk of the side chain. The substitutions that can produce the greatest changes in the protein properties will be those in which (a) a hydrophilic residue, e.g. seryl or threonyl, is substituted for (or by) a hydrophobic residue, e.g. leucyl, isoleucyl, phenylalanyl, valyl or alanyl; (b) a cysteine or proline is substituted for (or by) any other residue; (c) a residue having an electropositive side chain, e.g., lysyl, arginyl, or histidyl, is substituted for (or by) an electronegative residue, e.g., glutamyl or aspartyl; or (d) a residue having a bulky side chain, e.g., phenylalanine, is substituted for (or by) one not having a side chain, e.g., glycine, in this case, (e) by increasing the number of sites for sulfation and/or glycosylation.

[0160] Minor variations in the amino acid sequences of HLDGC proteins are provided by the present invention. The variations in the amino acid sequence can be when the sequence maintains at least about 30%, at least about 40%, at least about 50%, at least about 60%, at least about 70%, at least about 75%, at least about 80%, at least about 90%, at least about 95%, or at least about 99% identity to SEQ ID NO: 1, 3, 5, 7, 9, 11, 13, 15, 17, 19, 21, or 23. For example, conservative amino acid replacements can be utilized. Conservative replacements are those that take place within a family of amino acids that are related in their side chains, wherein the interchangeability of residues have similar side chains.

[0161] Genetically encoded amino acids are generally divided into families: (1) acidic amino acids are aspartate, glutamate; (2) basic amino acids are lysine, arginine, histidine; (3) non-polar amino acids are alanine, valine, leucine, isoleucine, proline, phenylalanine, methionine, tryptophan, and (4) uncharged polar amino acids are glycine, asparagine, glutamine, cysteine, serine, threonine, tyrosine. The hydrophilic amino acids include arginine, asparagine, aspartate, glutamine, glutamate, histidine, lysine, serine, and threonine. The hydrophobic amino acids include alanine, cysteine, isoleucine, leucine, methionine, phenylalanine, proline, tryptophan, tyrosine and valine. Other families of amino acids include (i) a group of amino acids having aliphatic-hydroxyl side chains, such as serine and threonine; (ii) a group of amino acids having amide-containing side chains, such as asparagine and glutamine; (iii) a group of amino acids having aliphatic side chains such as glycine, alanine, valine, leucine, and isoleucine; (iv) a group of amino acids having aromatic side chains, such as phenylalanine, tyrosine, and tryptophan; and (v) a group of amino acids having sulfur-containing side chains, such as cysteine and methionine. Useful conservative amino acids substitution groups are: valine-leucine-isoleucine, phenylalanine-tyrosine, lysine-arginine, alanine valine, glutamic-aspartic, and asparagine-glutamine.

[0162] For example, the replacement of one amino acid residue with another that is biologically and/or chemically similar is known to those skilled in the art as a conservative substitution. For example, a conservative substitution would be replacing one hydrophobic residue for another, or one polar residue for another. The substitutions include combinations such as, for example, Gly, Ala; Val, Ile, Leu; Asp, Glu; Asn, Gin; Ser, Thr; Lys, Arg; and Phe, Tyr. Substitutional or deletional mutagenesis can be employed to insert sites for N-glycosylation (Asn-X-Thr/Ser) or O-glycosylation (Ser or Thr). Deletions of cysteine or other labile residues also can be desirable. Deletions or substitutions of potential proteolysis sites, e.g. Arg, is accomplished for example by deleting one of the basic residues or substituting one by glutaminyl or histidyl residues.

[0163] Bacterial and Yeast Expression Systems.

[0164] In bacterial systems, a number of expression vectors can be selected. For example, when a large quantity of a protein encoded by a Hair Loss Disorder Gene Cohort (HLDGC) gene, such as CTLA-4, IL-2, IL-21, IL-2RA/CD25, IKZF4, an HLA Region residing gene, PTGER4, PRDX5, STX17, NKG2D, ULBP6, ULBP3, HDAC4, CACNA2D3, IL-13, IL-6, CHCHD3, CSMD1, IFNG, IL-26, KIAA0350 (CLEC16A), SOCS1, ANKRD12, or PTPN2, is needed for the induction of antibodies, vectors which direct high level expression of proteins that are readily purified can be used. Non-limiting examples of such vectors include multifunctional E. coli cloning and expression vectors such as BLUESCRIPT (Stratagene). pIN vectors or pGEX vectors (Promega, Madison, Wis.) also can be used to express foreign polypeptide molecules as fusion proteins with glutathione S-transferase (GST). In general, such fusion proteins are soluble and can easily be purified from lysed cells by adsorption to glutathione-agarose beads followed by elution in the presence of free glutathione. Proteins made in such systems can be designed to include heparin, thrombin, or factor Xa protease cleavage sites so that the cloned polypeptide of interest can be released from the GST moiety at will.

[0165] Plant and Insect Expression Systems.

[0166] If plant expression vectors are used, the expression of sequences encoding a HLDGC protein can be driven by any of a number of promoters. For example, viral promoters such as the 35S and 19S promoters of CaMV can be used alone or in combination with the omega leader sequence from TMV. Alternatively, plant promoters such as the small subunit of RUBISCO or heat shock promoters, can be used. These constructs can be introduced into plant cells by direct DNA transformation or by pathogen-mediated transfection.

[0167] An insect system also can be used to express HLDGC proteins. For example, in one such system Autographa californica nuclear polyhedrosis virus (AcNPV) is used as a vector to express foreign genes in Spodoptera frugiperda cells or in Trichoplusia larvae. Sequences encoding a HLDGC polypeptide can be cloned into a non-essential region of the virus, such as the polyhedrin gene, and placed under control of the polyhedrin promoter. Successful insertion of nucleic acid sequences, such as a sequence corresponding to a HLDGC gene, such as CTLA-4, IL-2, IL-21, IL-2RA/CD25, IKZF4, an HLA Region residing gene, PTGER4, PRDX5, STX17, NKG2D, ULBP6, ULBP3, HDAC4, CACNA2D3, IL-13, IL-6, CHCHD3, CSMD1, IFNG, IL-26, KIAA0350 (CLEC16A), SOCS1, ANKRD12, or PTPN2, will render the polyhedrin gene inactive and produce recombinant virus lacking coat protein. The recombinant viruses can then be used to infect S. frugiperda cells or Trichoplusia larvae in which HLDGC or a variant thereof can be expressed.

[0168] Mammalian Expression Systems.

[0169] An expression vector can include a nucleotide sequence that encodes a HLDGC polypeptide linked to at least one regulatory sequence in a manner allowing expression of the nucleotide sequence in a host cell. A number of viral-based expression systems can be used to express a HLDGC protein or a variant thereof in mammalian host cells. For example, if an adenovirus is used as an expression vector, sequences encoding a HLDGC protein can be ligated into an adenovirus transcription/translation complex comprising the late promoter and tripartite leader sequence. Insertion into a non-essential E1 or E3 region of the viral genome can be used to obtain a viable virus which expresses a HLDGC protein in infected host cells. Transcription enhancers, such as the Rous sarcoma virus (RSV) enhancer, can also be used to increase expression in mammalian host cells.

[0170] Regulatory sequences are well known in the art, and can be selected to direct the expression of a protein or polypeptide of interest in an appropriate host cell as described in Goeddel, Gene Expression Technology: Methods in Enzymology 185, Academic Press, San Diego, Calif. (1990). Non-limiting examples of regulatory sequences include: polyadenylation signals, promoters (such as CMV, ASV, SV40, or other viral promoters such as those derived from bovine papilloma, polyoma, and Adenovirus 2 viruses (Fiers, et al., 1973, Nature 273:113; Hager G L, et al., Curr Opin Genet Dev, 2002, 12(2):137-41) enhancers, and other expression control elements.

[0171] Enhancer regions, which are those sequences found upstream or downstream of the promoter region in non-coding DNA regions, are also known in the art to be important in optimizing expression. If needed, origins of replication from viral sources can be employed, such as if a prokaryotic host is utilized for introduction of plasmid DNA. However, in eukaryotic organisms, chromosome integration is a common mechanism for DNA replication.

[0172] For stable transfection of mammalian cells, a small fraction of cells can integrate introduced DNA into their genomes. The expression vector and transfection method utilized can be factors that contribute to a successful integration event. For stable amplification and expression of a desired protein, a vector containing DNA encoding a protein of interest is stably integrated into the genome of eukaryotic cells (for example mammalian cells, such as cells from the end bulb of the hair follicle), resulting in the stable expression of transfected genes. An exogenous nucleic acid sequence can be introduced into a cell (such as a mammalian cell, either a primary or secondary cell) by homologous recombination as disclosed in U.S. Pat. No. 5,641,670, the contents of which are herein incorporated by reference.

[0173] A gene that encodes a selectable marker (for example, resistance to antibiotics or drugs, such as ampicillin, neomycin, G418, and hygromycin) can be introduced into host cells along with the gene of interest in order to identify and select clones that stably express a gene encoding a protein of interest. The gene encoding a selectable marker can be introduced into a host cell on the same plasmid as the gene of interest or can be introduced on a separate plasmid. Cells containing the gene of interest can be identified by drug selection wherein cells that have incorporated the selectable marker gene will survive in the presence of the drug. Cells that have not incorporated the gene for the selectable marker die. Surviving cells can then be screened for the production of the desired protein molecule (for example, a protein encoded by a HLDGC gene, such as CTLA-4, IL-2, IL-21, IL-2RA/CD25, IKZF4, a HLA Region residing gene, PTGER4, PRDX5, STX17, NKG2D, ULBP6, ULBP3, HDAC4, CACNA2D3, IL-13, IL-6, CHCHD3, CSMD1, IFNG, IL-26, KIAA0350 (CLEC16A), SOCS1, ANKRD12, or PTPN2).

[0174] Cell Transfection

[0175] A eukaryotic expression vector can be used to transfect cells in order to produce proteins encoded by nucleotide sequences of the vector. Mammalian cells (such as isolated cells from the hair bulb; for example dermal sheath cells and dermal papilla cells) can contain an expression vector (for example, one that contains a gene encoding a HLDGC protein or polypeptide) via introducing the expression vector into an appropriate host cell via methods known in the art.

[0176] A host cell strain can be chosen for its ability to modulate the expression of the inserted sequences or to process the expressed polypeptide encoded by a HLDGC gene, such as CTLA-4, IL-2, IL-21, IL-2RA/CD25, IKZF4, a HLA Region residing gene, PTGER4, PRDX5, STX17, NKG2D, ULBP6, ULBP3, HDAC4, CACNA2D3, IL-13, IL-6, CHCHD3, CSMD1, IFNG, IL-26, KIAA0350 (CLEC16A), SOCS1, ANKRD12, or PTPN2 in the desired fashion. Such modifications of the polypeptide include, but are not limited to, acetylation, carboxylation, glycosylation, phosphorylation, lipidation, and acylation. Post-translational processing which cleaves a “prepro” form of the polypeptide also can be used to facilitate correct insertion, folding and/or function. Different host cells which have specific cellular machinery and characteristic mechanisms for post-translational activities (e.g., CHO, HeLa, MDCK, HEK293, and W138), are available from the American Type Culture Collection (ATCC; 10801 University Boulevard, Manassas, Va. 20110-2209) and can be chosen to ensure the correct modification and processing of the foreign protein.

[0177] An exogenous nucleic acid can be introduced into a cell via a variety of techniques known in the art, such as lipofection, microinjection, calcium phosphate or calcium chloride precipitation, DEAE-dextran-mediated transfection, or electroporation. Electroporation is carried out at approximate voltage and capacitance to result in entry of the DNA construct(s) into cells of interest (such as cells of the end bulb of a hair follicle, for example dermal papilla cells or dermal sheath cells). Other transfection methods also include modifiedcalcium phosphate precipitation, polybrene precipitation, liposome fusion, and receptor-mediated gene delivery.

[0178] Cells that will be genetically engineered can be primary and secondary cells obtained from various tissues, and include cell types which can be maintained and propagated in culture. Non-limiting examples of primary and secondary cells include epithelial cells (for example, dermal papilla cells, hair follicle cells, inner root sheath cells, outer root sheath cells, sebaceous gland cells, epidermal matrix cells), neural cells, endothelial cells, glial cells, fibroblasts, muscle cells (such as myoblasts) keratinocytes, formed elements of the blood (e.g., lymphocytes, bone marrow cells), and precursors of these somatic cell types.

[0179] Vertebrate tissue can be obtained by methods known to one skilled in the art, such a punch biopsy or other surgical methods of obtaining a tissue source of the primary cell type of interest. In one embodiment, a punch biopsy or removal can be used to obtain a source of keratinocytes, fibroblasts, endothelial cells, or mesenchymal cells (for example, hair follicle cells or dermal papilla cells). In another embodiment, removal of a hair follicle can be used to obtain a source of fibroblasts, keratinocytes, endothelial cells, or mesenchymal cells (for example, hair follicle cells or dermal papilla cells). A mixture of primary cells can be obtained from the tissue, using methods readily practiced in the art, such as explanting or enzymatic digestion (for examples using enzymes such as pronase, trypsin, collagenase, elastase dispase, and chymotrypsin). Biopsy methods have also been described in United States Patent Application Publication 2004/0057937 and PCT application publication WO 2001/32840, and are hereby incorporated by reference.

[0180] Primary cells can be acquired from the individual to whom the genetically engineered primary or secondary cells are administered. However, primary cells can also be obtained from a donor, other than the recipient, of the same species. The cells can also be obtained from another species (for example, rabbit, cat, mouse, rat, sheep, goat, dog, horse, cow, bird, or pig). Primary cells can also include cells from an isolated vertebrate tissue source grown attached to a tissue culture substrate (for example, flask or dish) or grown in a suspension; cells present in an explant derived from tissue; both of the aforementioned cell types plated for the first time; and cell culture suspensions derived from these plated cells. Secondary cells can be plated primary cells that are removed from the culture substrate and replated, or passaged, in addition to cells from the subsequent passages. Secondary cells can be passaged one or more times. These primary or secondary cells can contain expression vectors having a gene that encodes a protein of interest (for example, a HLDGC protein or polypeptide).

[0181] Cell Culturing

[0182] Various culturing parameters can be used with respect to the host cell being cultured. Appropriate culture conditions for mammalian cells are well known in the art (Cleveland W L, et al., J Immunol Methods, 1983, 56(2): 221-234) or can be determined by the skilled artisan (see, for example, Animal Cell Culture: A Practical Approach 2nd Ed., Rickwood, D. and Names, B. D., eds. (Oxford University Press: New York, 1992)). Cell culturing conditions can vary according to the type of host cell selected. Commercially available medium can be utilized. Non-limiting examples of medium include, for example, Minimal Essential Medium (MEM, Sigma, St. Louis, Mo.); Dulbecco's Modified Eagles Medium (DMEM, Sigma); Ham's F10 Medium (Sigma); HyClone cell culture medium (HyClone, Logan, Utah); RPMI-1640 Medium (Sigma); and chemically-defined (CD) media, which are formulated for various cell types, e.g., CD-CHO Medium (Invitrogen, Carlsbad, Calif.).

[0183] The cell culture media can be supplemented as necessary with supplementary components or ingredients, including optional components, in appropriate concentrations or amounts, as necessary or desired. Cell culture medium solutions provide at least one component from one or more of the following categories: (1) an energy source, usually in the form of a carbohydrate such as glucose; (2) all essential amino acids, and usually the basic set of twenty amino acids plus cysteine; (3) vitamins and/or other organic compounds required at low concentrations; (4) free fatty acids or lipids, for example linoleic acid; and (5) trace elements, where trace elements are defined as inorganic compounds or naturally occurring elements that can be required at very low concentrations, usually in the micromolar range.

[0184] The medium also can be supplemented electively with one or more components from any of the following categories: (1) salts, for example, magnesium, calcium, and phosphate; (2) hormones and other growth factors such as, serum, insulin, transferrin, and epidermal growth factor; (3) protein and tissue hydrolysates, for example peptone or peptone mixtures which can be obtained from purified gelatin, plant material, or animal byproducts; (4) nucleosides and bases such as, adenosine, thymidine, and hypoxanthine; (5) buffers, such as HEPES; (6) antibiotics, such as gentamycin or ampicillin; (7) cell protective agents, for example pluronic polyol; and (8) galactose. In one embodiment, soluble factors can be added to the culturing medium.

[0185] The mammalian cell culture that can be used with the present invention is prepared in a medium suitable for the type of cell being cultured. In one embodiment, the cell culture medium can be any one of those previously discussed (for example, MEM) that is supplemented with serum from a mammalian source (for example, fetal bovine serum (FBS)). In another embodiment, the medium can be a conditioned medium to sustain the growth of epithelial cells or cells obtained from the hair bulb of a hair follicle (such as dermal papilla cells or dermal sheath cells). For example, epithelial cells can be cultured according to Barnes and Mather in Animal Cell Culture Methods (Academic Press, 1998), which is hereby incorporated by reference in its entirety. In a further embodiment, epithelial cells or hair follicle cells can be transfected with DNA vectors containing genes that encode a polypeptide or protein of interest (for example, a HLDGC protein or polypeptide). In other embodiments of the invention, cells are grown in a suspension culture (for example, a three-dimensional culture such as a hanging drop culture) in the presence of an effective amount of enzyme, wherein the enzyme substrate is an extracellular matrix molecule in the suspension culture. For example, the enzyme can be a hyaluronidase. Epithelial cells or hair follicle cells can be cultivated according to methods practiced in the art, for example, as those described in PCT application publication WO 2004/044188 and in U.S. Patent Application Publication No. 2005/0272150, or as described by Harris in Handbook in Practical Animal Cell Biology: Epithelial Cell Culture (Cambridge Univ. Press, Great Britain; 1996; see Chapter 8), which are hereby incorporated by reference.

[0186] A suspension culture is a type of culture wherein cells, or aggregates of cells (such as aggregates of DP cells), multiply while suspended in liquid medium. A suspension culture comprising mammalian cells can be used for the maintenance of cell types that do not adhere or to enable cells to manifest specific cellular characteristics that are not seen in the adherent form. Some types of suspension cultures can include three-dimensional cultures or a hanging drop culture. A hanging-drop culture is a culture in which the material to be cultivated is inoculated into a drop of fluid attached to a flat surface (such as a coverglass, glass slide, Petri dish, flask, and the like), and can be inverted over a hollow surface. Cells in a hanging drop can aggregate toward the hanging center of a drop as a result of gravity. However, according to the methods of the invention, cells cultured in the presence of a protein that degrades the extracellular matrix (such as collagenase, chondroitinase, hyaluronidase, and the like) will become more compact and aggregated within the hanging drop culture, for degradation of the ECM will allow cells to become closer in proximity to one another since less of the ECM will be present. See also International PCT Publication No. WO2007/100870, which is incorporated by reference.

[0187] Cells obtained from the hair bulb of a hair follicle (such as dermal papilla cells or dermal sheath cells) can be cultured as a single, homogenous population (for example, comprising DP cells) in a hanging drop culture so as to generate an aggregate of DP cells. Cells can also be cultured as a heterogeneous population (for example, comprising DP and DS cells) in a hanging drop culture so as to generate a chimeric aggregate of DP and DS cells. Epithelial cells can be cultured as a monolayer to confluency as practiced in the art. Such culturing methods can be carried out essentially according to methods described in Chapter 8 of the Handbook in Practical Animal Cell Biology: Epithelial Cell Culture (Cambridge Univ. Press, Great Britain; 1996); Underhill C B, J Invest Dermatol, 1993, 101(6):820-6); in Armstrong and Armstrong, (1990) J Cell Biol 110:1439-55; or in Animal Cell Culture Methods (Academic Press, 1998), which are all hereby incorporated by reference in their entireties.

[0188] Three-dimensional cultures can be formed from agar (such as Gey's Agar), hydrogels (such as matrigel, agarose, and the like; Lee et al., (2004) Biomaterials 25: 2461-2466) or polymers that are cross-linked. These polymers can comprise natural polymers and their derivatives, synthetic polymers and their derivatives, or a combination thereof. Natural polymers can be anionic polymers, cationic polymers, amphipathic polymers, or neutral polymers. Non-limiting examples of anionic polymers can include hyaluronic acid, alginic acid (alginate), carageenan, chondroitin sulfate, dextran sulfate, and pectin. Some examples of cationic polymers, include but are not limited to, chitosan or polylysine. (Peppas et al., (2006) Adv Mater. 18: 1345-60; Hoffman, A. S., (2002) Adv Drug Deliv Rev. 43: 3-12; Hoffman, A. S., (2001) Ann NY Acad Sci 944: 62-73). Examples of amphipathic polymers can include, but are not limited to collagen, gelatin, fibrin, and carboxymethyl chitin. Non-limiting examples of neutral polymers can include dextran, agarose, or pullulan. (Peppas et al., (2006) Adv Mater. 18: 1345-60; Hoffman, A. S., (2002) Adv Drug Deliv Rev. 43: 3-12; Hoffman, A. S., (2001) Ann NY Acad Sci 944: 62-73).

[0189] Cells suitable for culturing according to methods of the invention can harbor introduced expression vectors, such as plasmids. The expression vector constructs can be introduced via transformation, microinjection, transfection, lipofection, electroporation, or infection. The expression vectors can contain coding sequences, or portions thereof, encoding the proteins for expression and production. Expression vectors containing sequences encoding the produced proteins and polypeptides, as well as the appropriate transcriptional and translational control elements, can be generated using methods well known to and practiced by those skilled in the art. These methods include synthetic techniques, in vitro recombinant DNA techniques, and in vivo genetic recombination which are described in J. Sambrook et al., 1989, Molecular Cloning, A Laboratory Manual, Cold Spring Harbor Press, Plainview, N.Y. and in F. M. Ausubel et al., 1989, Current Protocols in Molecular Biology, John Wiley & Sons, New York, N.Y.

[0190] Obtaining and Purifying Polypeptides

[0191] A polypeptide molecule encoded by a HLDGC gene, such as CTLA-4, IL-2, IL-21, IL-2RA/CD25, IKZF4, a HLA Region residing gene, PTGER4, PRDX5, STX17, NKG2D, ULBP6, ULBP3, HDAC4, CACNA2D3, IL-13, IL-6, CHCHD3, CSMD1, IFNG, IL-26, KIAA0350 (CLEC16A), SOCS1, ANKRD12, or PTPN2, or a variant thereof, can be obtained by purification from human cells expressing a HLDGC protein or polypeptide via in vitro or in vivo expression of a nucleic acid sequence encoding a HLDGC protein or polypeptide; or by direct chemical synthesis.

[0192] Detecting Polypeptide Expression.

[0193] Host cells which contain a nucleic acid encoding a HLDGC protein or polypeptide, and which subsequently express a protein encoded by a HLDGC gene, can be identified by various procedures known to those of skill in the art. These procedures include, but are not limited to, DNA-DNA or DNA-RNA hybridizations and protein bioassay or immunoassay techniques which include membrane, solution, or chip-based technologies for the detection and/or quantification of nucleic acid or protein. For example, the presence of a nucleic acid encoding a HLDGC protein or polypeptide can be detected by DNA-DNA or DNA-RNA hybridization or amplification using probes or fragments of nucleic acids encoding a HLDGC protein or polypeptide. In one embodiment, a fragment of a nucleic acid of a HLDGC gene can encompass any portion of at least about 8 consecutive nucleotides of SEQ ID NO: 2, 4, 6, 8, 10, 12, 14, 16, 18, 20, 22, or 24. In another embodiment, the fragment can comprise at least about 10 consecutive nucleotides, at least about 15 consecutive nucleotides, at least about 20 consecutive nucleotides, or at least about 30 consecutive nucleotides of SEQ ID NO: 2, 4, 6, 8, 10, 12, 14, 16, 18, 20, 22, or 24. Fragments can include all possible nucleotide lengths between about 8 and about 100 nucleotides, for example, lengths between about 15 and about 100 nucleotides, or between about 20 and about 100 nucleotides. Nucleic acid amplification-based assays involve the use of oligonucleotides selected from sequences encoding a polypeptide encoded by a HLDGC gene to detect transformants which contain a nucleic acid encoding a HLDGC protein or polypeptide.

[0194] Protocols for detecting and measuring the expression of a polypeptide encoded by a HLDGC gene, such as CTLA-4, IL-2, IL-21, IL-2RA/CD25, IKZF4, a HLA Region residing gene, PTGER4, PRDX5, STX17, NKG2D, ULBP6, ULBP3, HDAC4, CACNA2D3, IL-13, IL-6, CHCHD3, CSMD1, IFNG, IL-26, KIAA0350 (CLEC16A), SOCS1, ANKRD12, or PTPN2, using either polyclonal or monoclonal antibodies specific for the polypeptide are well established. Non-limiting examples include enzyme-linked immunosorbent assay (ELISA), radioimmunoassay (RIA), and fluorescence activated cell sorting (FACS). A two-site, monoclonal-based immunoassay using monoclonal antibodies reactive to two non-interfering epitopes on a polypeptide encoded by a HLDGC gene can be used, or a competitive binding assay can be employed.

[0195] Labeling and conjugation techniques are known by those skilled in the art and can be used in various nucleic acid and amino acid assays. Methods for producing labeled hybridization or PCR probes for detecting sequences related to nucleic acid sequences encoding a HLDGC protein, such as CTLA-4, IL-2, IL-21, IL-2RA/CD25, IKZF4, a protein encoded by a HLA Region residing gene, PTGER4, PRDX5, STX17, NKG2D, ULBP6, ULBP3, HDAC4, CACNA2D3, IL-13, IL-6, CHCHD3, CSMD1, IFNG, IL-26, KIAA0350 (CLEC16A), SOCS1, ANKRD12, or PTPN2, include, but are not limited to, oligolabeling, nick translation, end-labeling, or PCR amplification using a labeled nucleotide. Alternatively, nucleic acid sequences encoding a polypeptide encoded by a HLDGC gene can be cloned into a vector for the production of an mRNA probe. Such vectors are known in the art, are commercially available, and can be used to synthesize RNA probes in vitro by addition of labeled nucleotides and an appropriate RNA polymerase such as T7, T3, or SP6. These procedures can be conducted using a variety of commercially available kits (Amersham Pharmacia Biotech, Promega, and US Biochemical). Suitable reporter molecules or labels which can be used for ease of detection include radionuclides, enzymes, and fluorescent, chemiluminescent, or chromogenic agents, as well as substrates, cofactors, inhibitors, and/or magnetic particles.

[0196] Expression and Purification of Polypeptides.

[0197] Host cells transformed with a nucleic acid sequence encoding a HLDGC polypeptide can be cultured under conditions suitable for the expression and recovery of the protein from cell culture. The polypeptide produced by a transformed cell can be secreted or contained intracellularly depending on the sequence and/or the vector used. Expression vectors containing a nucleic acid sequence encoding a HLDGC polypeptide can be designed to contain signal sequences which direct secretion of soluble polypeptide molecules encoded by a HLDGC gene, such as CTLA-4, IL-2, IL-21, IL-2RA/CD25, IKZF4, a HLA Region residing gene, PTGER4, PRDX5, STX17, NKG2D, ULBP6, ULBP3, HDAC4, CACNA2D3, IL-13, IL-6, CHCHD3, CSMD1, IFNG, IL-26, KIAA0350 (CLEC16A), SOCS1, ANKRD12, or PTPN2, or a variant thereof, through a prokaryotic or eukaryotic cell membrane or which direct the membrane insertion of membrane-bound a polypeptide molecule encoded by a HLDGC gene or a variant thereof.

[0198] Other constructions can also be used to join a gene sequence encoding a HLDGC polypeptide to a nucleotide sequence encoding a polypeptide domain which will facilitate purification of soluble proteins. Such purification facilitating domains include, but are not limited to, metal chelating peptides such as histidine-tryptophan modules that allow purification on immobilized metals, protein A domains that allow purification on immobilized immunoglobulin, and the domain utilized in the FLAGS extension/affinity purification system (Immunex Corp., Seattle, Wash.). Including cleavable linker sequences (i.e., those specific for Factor Xa or enterokinase (Invitrogen, San Diego, Calif.)) between the purification domain and a polypeptide encoded by a HLDGC gene also can be used to facilitate purification. One such expression vector provides for expression of a fusion protein containing a polypeptide encoded by a HLDGC gene and 6 histidine residues preceding a thioredoxin or an enterokinase cleavage site. The histidine residues facilitate purification by immobilized metal ion affinity chromatography, while the enterokinase cleavage site provides a means for purifying the polypeptide encoded by a HLDGC gene.

[0199] A HLDGC polypeptide can be purified from any human or non-human cell which expresses the polypeptide, including those which have been transfected with expression constructs that express a HLDGC protein. A purified HLDGC protein can be separated from other compounds which normally associate with a protein encoded by a HLDGC gene in the cell, such as certain proteins, carbohydrates, or lipids, using methods practiced in the art. Non-limiting methods include size exclusion chromatography, ammonium sulfate fractionation, ion exchange chromatography, affinity chromatography, and preparative gel electrophoresis.

[0200] Chemical Synthesis.

[0201] Nucleic acid sequences comprising a HLDGC gene that encodes a polypeptide can be synthesized, in whole or in part, using chemical methods known in the art. Alternatively, a HLDGC polypeptide can be produced using chemical methods to synthesize its amino acid sequence, such as by direct peptide synthesis using solid-phase techniques. Protein synthesis can either be performed using manual techniques or by automation. Automated synthesis can be achieved, for example, using Applied Biosystems 431A Peptide Synthesizer (Perkin Elmer). Optionally, fragments of HLDGC polypeptides can be separately synthesized and combined using chemical methods to produce a full-length molecule. In one embodiment, a fragment of a nucleic acid sequence that comprises a gene of a HLDGC can encompass any portion of at least about 8 consecutive nucleotides of SEQ ID NO: 2, 4, 6, 8, 10, 12, 14, 16, 18, 20, 22, or 24. In one embodiment, the fragment can comprise at least about 10 nucleotides, at least about 15 nucleotides, at least about 20 nucleotides, or at least about 30 nucleotides of SEQ ID NO: 2, 4, 6, 8, 10, 12, 14, 16, 18, 20, 22, or 24. Fragments include all possible nucleotide lengths between about 8 and about 100 nucleotides, for example, lengths between about 15 and about 100 nucleotides, or between about 20 and about 100 nucleotides.

[0202] A HLDGC fragment can be a fragment of a HLDGC protein, such as CTLA-4, IL-2, IL-21, IL-2RA/CD25, IKZF4, a protein encoded by a HLA Region residing gene, PTGER4, PRDX5, STX17, NKG2D, ULBP6, ULBP3, HDAC4, CACNA2D3, IL-13, IL-6, CHCHD3, CSMD1, IFNG, IL-26, KIAA0350 (CLEC16A), SOCS1, ANKRD12, or PTPN2. In one embodiment, the HLA Region residing gene is selected from the group consisting of a gene of the HLA Class I Region, a gene of the HLA Class II Region, PTPN22, and AIRE. In one embodiment, the HLA Class I Region gene is HLA-A, HLA-B, HLA-C, HLA-DQB1, HLA-DRB1, MICA, MICB, HLA-G or NOTCH4. In some embodiments, the HLA Class II Region gene is HLA-DOB, HLA-DQA1, HLA-DQA2, HLA-DQB2, TAP2, or HLA-DRA. For example, the HLDGC fragment can encompass any portion of at least about 8 consecutive amino acids of SEQ ID NO: 1, 3, 5, 7, 9, 11, 13, 15, 17, 19, 21, or 23. The fragment can comprise at least about 10 consecutive amino acids, at least about 20 consecutive amino acids, at least about 30 consecutive amino acids, at least about 40 consecutive amino acids, a least about 50 consecutive amino acids, at least about 60 consecutive amino acids, at least about 70 consecutive amino acids, or at least about 75 consecutive amino acids of SEQ ID NO: 1, 3, 5, 7, 9, 11, 13, 15, 17, 19, 21, or 23. Fragments include all possible amino acid lengths between about 8 and 100 about amino acids, for example, lengths between about 10 and about 100 amino acids, between about 15 and about 100 amino acids, between about 20 and about 100 amino acids, between about 35 and about 100 amino acids, between about 40 and about 100 amino acids, between about 50 and about 100 amino acids, between about 70 and about 100 amino acids, between about 75 and about 100 amino acids, or between about 80 and about 100 amino acids.

[0203] A synthetic peptide can be substantially purified via high performance liquid chromatography (HPLC). The composition of a synthetic HLDGC polypeptide can be confirmed by amino acid analysis or sequencing. Additionally, any portion of an amino acid sequence comprising a protein encoded by a HLDGC gene can be altered during direct synthesis and/or combined using chemical methods with sequences from other proteins to produce a variant polypeptide or a fusion protein.

[0204] Identifying HLDGC Modulating Compounds.

[0205] The invention provides methods for identifying compounds which can be used for controlling and/or regulating hair growth (for example, hair density) or hair pigmentation in a subject. Since invention has provided the identification of the genes listed herein as genes associated with a hair loss disorder, the invention also provides methods for identifiying compounds that modulate the expression or activity of an HLDGC gene and/or HLDGC protein. In addition, the invention provides methods for identifying compounds which can be used for the treatment of a hair loss disorder. The invention also provides methods for identifying compounds which can be used for the treatment of hypotrichosis (for example, hereditary hypotrichosis simplex (HHS)). Non-limiting examples of hair loss disorders include: androgenetic alopecia, Alopecia areata, telogen effluvium, alopecia areata, alopecia totalis, and alopecia universalis. The methods can comprise the identification of test compounds or agents (e.g., peptides (such as antibodies or fragments thereof), small molecules, nucleic acids (such as siRNA or antisense RNA), or other agents) that can bind to a polypeptide molecule encoded by a HLDGC gene and/or have a stimulatory or inhibitory effect on the biological activity of a protein encoded by a HLDGC gene or its expression, and subsequently determining whether these compounds can regulate hair growth in a subject or can have an effect on symptoms associated with the hair loss disorders in an in vivo assay (i.e., examining an increase or reduction in hair growth).

[0206] As used herein, an “HLDGC modulating compound” refers to a compound that interacts with an HLDGC gene or an HLDGC protein or polypeptide and modulates its activity and/or its expression. The compound can either increase the activity or expression of a protein encoded by a HLDGC gene. Conversely, the compound can decrease the activity or expression of a protein encoded by a HLDGC gene. The compound can be a HLDGC agonist or a HLDGC antagonist. Some non-limiting examples of HLDGC modulating compounds include peptides (such as peptide fragments comprising a polypeptide encoded by a HLDGC gene, or antibodies or fragments thereof, fusion proteins, or the like), small molecules, and nucleic acids (such as siRNA or antisense RNA specific for a nucleic acid comprising a comprising a HLDGC). Agonists of a HLDGC protein can be molecules which, when bound to a HLDGC protein, increase or prolong the activity of the HLDGC protein. HLDGC agonists include, but are not limited to, proteins, nucleic acids, small molecules, or any other molecule which activates a HLDGC protein. Antagonists of a HLDGC protein can be molecules which, when bound to a HLDGC protein decrease the amount or the duration of the activity of the HLDGC protein. Antagonists include proteins, nucleic acids, antibodies, small molecules, or any other molecule which decrease the activity of a HLDGC protein.

[0207] The term “modulate,” as it appears herein, refers to a change in the activity or expression of a HLDGC gene or protein. For example, modulation can cause an increase or a decrease in protein activity, binding characteristics, or any other biological, functional, or immunological properties of a HLDGC protein.

[0208] In one embodiment, a HLDGC modulating compound can be a peptide fragment of a HLDGC protein that binds to the protein. For example, the HLDGC polypeptide can encompass any portion of at least about 8 consecutive amino acids of SEQ ID NO: 1, 3, 5, 7, 9, 11, 13, 15, 17, 19, 21, or 23. The fragment can comprise at least about 10 consecutive amino acids, at least about 20 consecutive amino acids, at least about 30 consecutive amino acids, at least about 40 consecutive amino acids, at least about 50 consecutive amino acids, at least about 60 consecutive amino acids, or at least about 75 consecutive amino acids of SEQ ID NO: 1, 3, 5, 7, 9, 11, 13, 15, 17, 19, 21, or 23. Fragments include all possible amino acid lengths between and including about 8 and about 100 amino acids, for example, lengths between about 10 and about 100 amino acids, between about 15 and about 100 amino acids, between about 20 and about 100 amino acids, between about 35 and about 100 amino acids, between about 40 and about 100 amino acids, between about 50 and about 100 amino acids, between about 70 and about 100 amino acids, between about 75 and about 100 amino acids, or between about 80 and about 100 amino acids. These peptide fragments can be obtained commercially or synthesized via liquid phase or solid phase synthesis methods (Atherton et al., (1989) Solid Phase Peptide Synthesis: a Practical Approach. IRL Press, Oxford, England). The HLDGC peptide fragments can be isolated from a natural source, genetically engineered, or chemically prepared. These methods are well known in the art.

[0209] A HLDGC modulating compound can be a protein, such as an antibody (monoclonal, polyclonal, humanized, chimeric, or fully human), or a binding fragment thereof, directed against a polypeptide encoded by a HLDGC gene. An antibody fragment can be a form of an antibody other than the full-length form and includes portions or components that exist within full-length antibodies, in addition to antibody fragments that have been engineered. Antibody fragments can include, but are not limited to, single chain Fv (scFv), diabodies, Fv, and (Fab′)₂, triabodies, Fc, Fab, CDR1, CDR2, CDR3, combinations of CDR's, variable regions, tetrabodies, bifunctional hybrid antibodies, framework regions, constant regions, and the like (see, Maynard et al., (2000) Ann. Rev. Biomed. Eng. 2:339-76; Hudson (1998) Curr. Opin. Biotechnol. 9:395-402). Antibodies can be obtained commercially, custom generated, or synthesized against an antigen of interest according to methods established in the art (Janeway et al., (2001) Immunobiology, 5th ed., Garland Publishing).

[0210] Inhibition of RNA encoding a polypeptide encoded by a HLDGC gene can effectively modulate the expression of a HLDGC gene from which the RNA is transcribed. Inhibitors are selected from the group comprising: siRNA; interfering RNA or RNAi; dsRNA; RNA Polymerase III transcribed DNAs; ribozymes; and antisense nucleic acids, which can be RNA, DNA, or an artificial nucleic acid.

[0211] Antisense oligonucleotides, including antisense DNA, RNA, and DNA/RNA molecules, act to directly block the translation of mRNA by binding to targeted mRNA and preventing protein translation. For example, antisense oligonucleotides of at least about 15 bases and complementary to unique regions of the DNA sequence encoding a polypeptide encoded by a HLDGC gene can be synthesized, e.g., by conventional phosphodiester techniques (Dallas et al., (2006) Med. Sci. Monit. 12(4):RA67-74; Kalota et al., (2006) Handb. Exp. Pharmacol. 173:173-96; Lutzelburger et al., (2006) Handb. Exp. Pharmacol. 173:243-59). Antisense nucleotide sequences include, but are not limited to: morpholinos, 2′-O-methyl polynucleotides, DNA, RNA and the like.

[0212] siRNA comprises a double stranded structure containing from about 15 to about 50 base pairs, for example from about 21 to about 25 base pairs, and having a nucleotide sequence identical or nearly identical to an expressed target gene or RNA within the cell. The siRNA comprise a sense RNA strand and a complementary antisense RNA strand annealed together by standard Watson-Crick base-pairing interactions. The sense strand comprises a nucleic acid sequence which is substantially identical to a nucleic acid sequence contained within the target miRNA molecule. “Substantially identical” to a target sequence contained within the target mRNA refers to a nucleic acid sequence that differs from the target sequence by about 3% or less. The sense and antisense strands of the siRNA can comprise two complementary, single-stranded RNA molecules, or can comprise a single molecule in which two complementary portions are base-paired and are covalently linked by a single-stranded “hairpin” area. See also, McMnaus and Sharp (2002) Nat Rev Genetics, 3:737-47, and Sen and Blau (2006) FASEB J., 20:1293-99, the entire disclosures of which are herein incorporated by reference.

[0213] The siRNA can be altered RNA that differs from naturally-occurring RNA by the addition, deletion, substitution and/or alteration of one or more nucleotides. Such alterations can include addition of non-nucleotide material, such as to the end(s) of the siRNA or to one or more internal nucleotides of the siRNA, or modifications that make the siRNA resistant to nuclease digestion, or the substitution of one or more nucleotides in the siRNA with deoxyribonucleotides. One or both strands of the siRNA can also comprise a 3′ overhang. As used herein, a 3′ overhang refers to at least one unpaired nucleotide extending from the 3′-end of a duplexed RNA strand. For example, the siRNA can comprise at least one 3′ overhang of from 1 to about 6 nucleotides (which includes ribonucleotides or deoxyribonucleotides) in length, or from 1 to about 5 nucleotides in length, or from 1 to about 4 nucleotides in length, or from about 2 to about 4 nucleotides in length. For example, each strand of the siRNA can comprise 3′ overhangs of dithymidylic acid (“TT”) or diuridylic acid (“uu”).

[0214] siRNA can be produced chemically or biologically, or can be expressed from a recombinant plasmid or viral vector (for example, see U.S. Pat. No. 7,294,504 and U.S. Pat. No. 7,422,896, the entire disclosures of which are herein incorporated by reference). Exemplary methods for producing and testing dsRNA or siRNA molecules are described in U.S. Patent Application Publication No. 2002/0173478 to Gewirtz, U.S. Patent Application Publication No. 2007/0072204 to Hannon et al., and in U.S. Patent Application Publication No. 2004/0018176 to Reich et al., the entire disclosures of which are herein incorporated by reference.

[0215] In one embodiment, an siRNA directed to human nucleic acid sequences comprising a HLDGC gene can comprise any one of SEQ ID NOS: 41-6152. Table 10, Table 11, and Table 12 each list siRNA sequences comprising SEQ ID NOS: 41-3154, 3155-4720, and 4721-6152, respectively. In some embodiments, the siRNA is directed to SEQ ID NO: 18, 20, or a combination thereof.

[0216] RNA polymerase III transcribed DNAs contain promoters, such as the U6 promoter. These DNAs can be transcribed to produce small hairpin RNAs in the cell that can function as siRNA or linear RNAs that can function as antisense RNA. The HLDGC modulating compound can contain ribonucleotides, deoxyribonucleotides, synthetic nucleotides, or any suitable combination such that the target RNA and/or gene is inhibited. In addition, these forms of nucleic acid can be single, double, triple, or quadruple stranded. (see for example Bass (2001) Nature, 411, 428 429; Elbashir et al., (2001) Nature, 411, 494 498; and PCT Publication Nos. WO 00/44895, WO 01/36646, WO 99/32619, WO 00/01846, WO 01/29058, WO 99/07409, WO 00/44914).

[0217] A HLDGC modulating compound can be a small molecule that binds to a HLDGC protein and disrupts its function, or conversely, enhances its function. Small molecules are a diverse group of synthetic and natural substances generally having low molecular weights. They can be isolated from natural sources (for example, plants, fungi, microbes and the like), are obtained commercially and/or available as libraries or collections, or synthesized. Candidate small molecules that modulate a HLDGC protein can be identified via in silico screening or high-through-put (HTP) screening of combinatorial libraries. Most conventional pharmaceuticals, such as aspirin, penicillin, and many chemotherapeutics, are small molecules, can be obtained commercially, can be chemically synthesized, or can be obtained from random or combinatorial libraries as described below (Werner et al., (2006) Brief Funct. Genomic Proteomic 5(1):32-6).

[0218] Knowledge of the primary sequence of a molecule of interest, such as a polypeptide encoded by a HLDGC gene, and the similarity of that sequence with proteins of known function, can provide information as to the inhibitors or antagonists of the protein of interest in addition to agonists. Identification and screening of agonists and antagonists is further facilitated by determining structural features of the protein, e.g., using X-ray crystallography, neutron diffraction, nuclear magnetic resonance spectrometry, and other techniques for structure determination. These techniques provide for the rational design or identification of agonists and antagonists.

[0219] Test compounds, such as HLDGC modulating compounds, can be screened from large libraries of synthetic or natural compounds (see Wang et al., (2007) Curr Med Chem, 14(2):133-55; Mannhold (2006) Curr Top Med Chem, 6 (10):1031-47; and Hensen (2006) Curr Med Chem 13(4):361-76). Numerous means are currently used for random and directed synthesis of saccharide, peptide, and nucleic acid based compounds. Synthetic compound libraries are commercially available from Maybridge Chemical Co. (Trevillet, Cornwall, UK), AMRI (Albany, N.Y.), ChemBridge (San Diego, Calif.), and MicroSource (Gaylordsville, Conn.). A rare chemical library is available from Aldrich (Milwaukee, Wis.). Alternatively, libraries of natural compounds in the form of bacterial, fungal, plant and animal extracts are available from e.g. Pan Laboratories (Bothell, Wash.) or MycoSearch (N.C.), or are readily producible. Additionally, natural and synthetically produced libraries and compounds are readily modified through conventional chemical, physical, and biochemical means (Blondelle et al., (1996) Tib Tech 14:60).

[0220] Methods for preparing libraries of molecules are well known in the art and many libraries are commercially available. Libraries of interest in the invention include peptide libraries, randomized oligonucleotide libraries, synthetic organic combinatorial libraries, and the like. Degenerate peptide libraries can be readily prepared in solution, in immobilized form as bacterial flagella peptide display libraries or as phage display libraries. Peptide ligands can be selected from combinatorial libraries of peptides containing at least one amino acid. Libraries can be synthesized of peptoids and non-peptide synthetic moieties. Such libraries can further be synthesized which contain non-peptide synthetic moieties, which are less subject to enzymatic degradation compared to their naturally-occurring counterparts. For example, libraries can also include, but are not limited to, peptide-on-plasmid libraries, synthetic small molecule libraries, aptamer libraries, in vitro translation-based libraries, polysome libraries, synthetic peptide libraries, neurotransmitter libraries, and chemical libraries.

[0221] Examples of chemically synthesized libraries are described in Fodor et al., (1991) Science 251:767-773; Houghten et al., (1991) Nature 354:84-86; Lam et al., (1991) Nature 354:82-84; Medynski, (1994) BioTechnology 12:709-710; Gallop et al., (1994) J. Medicinal Chemistry 37(9):1233-1251; Ohlmeyer et al., (1993) Proc. Natl. Acad. Sci. USA 90:10922-10926; Erb et al., (1994) Proc. Natl. Acad. Sci. USA 91:11422-11426; Houghten et al., (1992) Biotechniques 13:412; Jayawickreme et al., (1994) Proc. Natl. Acad. Sci. USA 91:1614-1618; Salmon et al., (1993) Proc. Natl. Acad. Sci. USA 90:11708-11712; PCT Publication No. WO 93/20242, dated Oct. 14, 1993; and Brenner et al., (1992) Proc. Natl. Acad. Sci. USA 89:5381-5383.

[0222] Examples of phage display libraries are described in Scott et al., (1990) Science 249:386-390; Devlin et al., (1990) Science, 249:404-406; Christian, et al., (1992) J Mol. Biol. 227:711-718; Lenstra, (1992) J. Immunol. Meth. 152:149-157; Kay et al., (1993) Gene 128:59-65; and PCT Publication No. WO 94/18318.

[0223] In vitro translation-based libraries include but are not limited to those described in PCT Publication No. WO 91/05058; and Mattheakis et al., (1994) Proc. Natl. Acad. Sci. USA 91:9022-9026.

[0224] As used herein, the term “ligand source” can be any compound library described herein, or tissue extract prepared from various organs in an organism's system, that can be used to screen for compounds that would act as an agonist or antagonist of a HLDGC protein. Screening compound libraries listed herein [also see U.S. Patent Application Publication No. 2005/0009163, which is hereby incorporated by reference in its entirety], in combination with in vivo animal studies, functional and signaling assays described below can be used to identify HLDGC modulating compounds that regulate hair growth or treat hair loss disorders.

[0225] Screening the libraries can be accomplished by any variety of commonly known methods. See, for example, the following references, which disclose screening of peptide libraries: Parmley and Smith, (1989) Adv. Exp. Med. Biol. 251:215-218; Scott and Smith, (1990) Science 249:386-390; Fowlkes et al., (1992) BioTechniques 13:422-427; Oldenburg et al., (1992) Proc. Natl. Acad. Sci. USA 89:5393-5397; Yu et al., (1994) Cell 76:933-945; Staudt et al., (1988) Science 241:577-580; Bock et al., (1992) Nature 355:564-566; Tuerk et al., (1992) Proc. Natl. Acad. Sci. USA 89:6988-6992; Ellington et al., (1992) Nature 355:850-852; U.S. Pat. Nos. 5,096,815; 5,223,409; and 5,198,346, all to Ladner et al.; Rebar et al., (1993) Science 263:671-673; and PCT Pub. WO 94/18318.

[0226] Small molecule combinatorial libraries can also be generated and screened. A combinatorial library of small organic compounds is a collection of closely related analogs that differ from each other in one or more points of diversity and are synthesized by organic techniques using multi-step processes. Combinatorial libraries include a vast number of small organic compounds. One type of combinatorial library is prepared by means of parallel synthesis methods to produce a compound array. A compound array can be a collection of compounds identifiable by their spatial addresses in Cartesian coordinates and arranged such that each compound has a common molecular core and one or more variable structural diversity elements. The compounds in such a compound array are produced in parallel in separate reaction vessels, with each compound identified and tracked by its spatial address. Examples of parallel synthesis mixtures and parallel synthesis methods are provided in U.S. Ser. No. 08/177,497, filed Jan. 5, 1994 and its corresponding PCT published patent application WO95/18972, published Jul. 13, 1995 and U.S. Pat. No. 5,712,171 granted Jan. 27, 1998 and its corresponding PCT published patent application WO96/22529, which are hereby incorporated by reference.

[0227] In one non-limiting example, non-peptide libraries, such as a benzodiazepine library (see e.g., Bunin et al., (1994) Proc. Natl. Acad. Sci. USA 91:4708-4712), can be screened. Peptoid libraries, such as that described by Simon et al., (1992) Proc. Natl. Acad. Sci. USA 89:9367-9371, can also be used. Another example of a library that can be used, in which the amide functionalities in peptides have been permethylated to generate a chemically transformed combinatorial library, is described by Ostresh et al. (1994), Proc. Natl. Acad. Sci. USA 91:11138-11142.

[0228] Computer modeling and searching technologies permit the identification of compounds, or the improvement of already identified compounds, that can modulate the expression or activity of a HLDGC protein. Having identified such a compound or composition, the active sites or regions of a HLDGC protein can be subsequently identified via examining the sites to which the compounds bind. These sites can be ligand binding sites and can be identified using methods known in the art including, for example, from the amino acid sequences of peptides, from the nucleotide sequences of nucleic acids, or from study of complexes of the relevant compound or composition with its natural ligand. In the latter case, chemical or X-ray crystallographic methods can be used to find the active site by finding where on the factor the complexed ligand is found.

[0229] The three dimensional geometric structure of a site, for example that of a polypeptide encoded by a HLDGC gene, can be determined by known methods in the art, such as X-ray crystallography, which can determine a complete molecular structure. Solid or liquid phase NMR can be used to determine certain intramolecular distances. Any other experimental method of structure determination can be used to obtain partial or complete geometric structures. The geometric structures can be measured with a complexed ligand, natural or artificial, which can increase the accuracy of the active site structure determined.

[0230] Other methods for preparing or identifying peptides that bind to a target are known in the art. Molecular imprinting, for instance, can be used for the de novo construction of macromolecular structures such as peptides that bind to a molecule. See, for example, Kenneth J. Shea, Molecular Imprinting of Synthetic Network Polymers: The De Novo synthesis of Macromolecular Binding and Catalytic Sites, TRIP Vol. 2, No. 5, May 1994; Mosbach, (1994) Trends in Biochem. Sci., 19(9); and Wulff, G., in Polymeric Reagents and Catalysts (Ford, W. T., Ed.) ACS Symposium Series No. 308, pp 186-230, American Chemical Society (1986). One method for preparing mimics of a HLDGC modulating compound involves the steps of: (i) polymerization of functional monomers around a known substrate (the template) that exhibits a desired activity; (ii) removal of the template molecule; and then (iii) polymerization of a second class of monomers in, the void left by the template, to provide a new molecule which exhibits one or more desired properties which are similar to that of the template. In addition to preparing peptides in this manner other binding molecules such as polysaccharides, nucleosides, drugs, nucleoproteins, lipoproteins, carbohydrates, glycoproteins, steroids, lipids, and other biologically active materials can also be prepared. This method is useful for designing a wide variety of biological mimics that are more stable than their natural counterparts, because they are prepared by the free radical polymerization of functional monomers, resulting in a compound with a nonbiodegradable backbone. Other methods for designing such molecules include for example drug design based on structure activity relationships, which require the synthesis and evaluation of a number of compounds and molecular modeling.

[0231] Screening Assays

[0232] HLDGC Modulating Compounds.

[0233] A HLDGC modulating compound can be a compound that affects the activity and/or expression of a HLDGC protein in vivo and/or in vitro. HLDGC modulating compounds can be agonists and antagonists of a HLDGC protein, and can be compounds that exert their effect on the activity of a HLDGC protein via the expression, via post-translational modifications, or by other means.

[0234] Test compounds or agents which bind to an HLDGC protein, and/or have a stimulatory or inhibitory effect on the activity or the expression of a HLDGC protein, can be identified by two types of assays: (a) cell-based assays which utilize cells expressing a HLDGC protein or a variant thereof on the cell surface; or (b) cell-free assays, which can make use of isolated HLDGC proteins. These assays can employ a biologically active fragment of a HLDGC protein, full-length proteins, or a fusion protein which includes all or a portion of a polypeptide encoded by a HLDGC gene). A HLDGC protein can be obtained from any suitable mammalian species (e.g., human, rat, chick, xenopus, equine, bovine or murine). The assay can be a binding assay comprising direct or indirect measurement of the binding of a test compound. The assay can also be an activity assay comprising direct or indirect measurement of the activity of a HLDGC protein. The assay can also be an expression assay comprising direct or indirect measurement of the expression of HLDGC mRNA nucleic acid sequences or a protein encoded by a HLDGC gene. The various screening assays can be combined with an in vivo assay comprising measuring the effect of the test compound on the symptoms of a hair loss disorder or disease in a subject (for example, androgenetic alopecia, alopecia areata, alopecia totalis, or alopecia universalis), loss of hair pigmentation in a subject, or even hypotrichosis.

[0235] An in vivo assay can also comprise assessing the effect of a test compound on regulating hair growth in known mammalian models that display defective or aberrant hair growth phenotypes or mammals that contain mutations in the open reading frame (ORF) of nucleic acid sequences comprising a gene of a HLDGC that affects hair growth regulation or hair density, or hair pigmentation. In one embodiment, controlling hair growth can comprise an induction of hair growth or density in the subject. Here, the compound's effect in regulating hair growth can be observed either visually via examining the organism's physical hair growth or loss, or by assessing protein or mRNA expression using methods known in the art.

[0236] Assays for screening test compounds that bind to or modulate the activity of a HLDGC protein can also be carried out. The test compound can be obtained by any suitable means, such as from conventional compound libraries. Determining the ability of the test compound to bind to a membrane-bound form of the HLDGC protein can be accomplished via coupling the test compound with a radioisotope or enzymatic label such that binding of the test compound to the cell expressing a HLDGC protein can be measured by detecting the labeled compound in a complex. For example, the test compound can be labeled with ³H, ¹⁴C, ³⁵S, or ¹²⁵I, either directly or indirectly, and the radioisotope can be subsequently detected by direct counting of radioemmission or by scintillation counting. Alternatively, the test compound can be enzymatically labeled with, for example, horseradish peroxidase, alkaline phosphatase, or luciferase, and the enzymatic label detected by determination of conversion of an appropriate substrate to product.

[0237] Cell-based assays can comprise contacting a cell expressing NKG2D with a test agent and determining the ability of the test agent to modulate (such as increase or decrease) the activity or the expression of the membrane-bound NKG2D molecule. Determining the ability of the test agent to modulate the activity of the membrane-bound NKG2D molecule can be accomplished by any method suitable for measuring the activity of such a molecule, such as monitoring downstream signaling events described in Lanier (Nat. Immunol. 2008 May; 9(5):495-502). Non-limiting examples include DAP10 phosphorylation, p85 PI3 kinase activity, Akt kinase activity, alteration in IFNγ concentration, of a NKG2D-ligand+ target cell, or a combination thereof (see also Roda-Navarro P, Reyburn H T., J Biol. Chem. 2009 Jun. 12; 284(24):16463-72; Tassi et al., Eur Immunol. 2009 April; 39(4): 1129-35; Coudert J D, et al., Blood. 2008 Apr. 1; 111(7):3571-8; Coudert J D, et al., Blood. 2005 106: 1711-1717; and Horng T, et al., Nat. Immunol. 2007 December; 8(12):1345-52, which describe methods and protocols that are all hereby incorporated by reference in their entireties).

[0238] A HLDGC protein or the target of a HLDGC protein can be immobilized to facilitate the separation of complexed from uncomplexed forms of one or both of the proteins. Binding of a test compound to a HLDGC protein or a variant thereof, or interaction of a HLDGC protein with a target molecule in the presence and absence of a test compound, can be accomplished in any vessel suitable for containing the reactants. Examples of such vessels include microtiter plates, test tubes, and micro-centrifuge tubes. In one embodiment, a fusion protein can be provided which adds a domain that allows one or both of the proteins to be bound to a matrix (for example, glutathione-S-transferase (GST) fusion proteins or glutathione-S-transferase fusion proteins can be adsorbed onto glutathione sepharose beads (Sigma Chemical; St. Louis, Mo.) or glutathione derivatized microtiter plates).

[0239] A HLDGC protein, or a variant thereof, can also be immobilized via being bound to a solid support. Non-limiting examples of suitable solid supports include glass or plastic slides, tissue culture plates, microtiter wells, tubes, silicon chips, or particles such as beads (including, but not limited to, latex, polystyrene, or glass beads). Any method known in the art can be used to attach a polypeptide (or polynucleotide) corresponding to HLDGC or a variant thereof, or test compound to a solid support, including use of covalent and non-covalent linkages, or passive absorption.

[0240] The diagnostic assay of the screening methods of the invention can also involve monitoring the expression of a HLDGC protein. For example, regulators of the expression of a HLDGC protein can be identified via contacting a cell with a test compound and determining the expression of a protein encoded by a HLDGC gene or HLDGC mRNA nucleic acid sequences in the cell. The expression level of a protein encoded by a HLDGC gene or HLDGC mRNA nucleic acid sequences in the cell in the presence of the test compound is compared to the protein or mRNA expression level in the absence of the test compound. The test compound can then be identified as a regulator of the expression of a HLDGC protein based on this comparison. For example, when expression of a protein encoded by a HLDGC gene or HLDGC mRNA nucleic acid sequences in the cell is statistically or significantly greater in the presence of the test compound than in its absence, the test compound is identified as a stimulator/enhancer of expression of a protein encoded by a HLDGC gene or HLDGC mRNA nucleic acid sequences in the cell. The test compound can be said to be a HLDGC modulating compound (such as an agonist).

[0241] Alternatively, when expression of a protein encoded by a HLDGC gene or HLDGC mRNA nucleic acid sequences in the cell is statistically or significantly less in the presence of the test compound than in its absence, the compound is identified as an inhibitor of the expression of a protein encoded by a HLDGC gene or HLDGC mRNA nucleic acid sequences in the cell. The test compound can also be said to be a HLDGC modulating compound (such as an antagonist). The expression level of a protein encoded by a HLDGC gene or HLDGC mRNA nucleic acid sequences in the cell in cells can be determined by methods previously described.

[0242] For binding assays, the test compound can be a small molecule which binds to and occupies the binding site of a polypeptide encoded by a HLDGC gene, or a variant thereof. This can make the ligand binding site inaccessible to substrate such that normal biological activity is prevented. Examples of such small molecules include, but are not limited to, small peptides or peptide-like molecules. In binding assays, either the test compound or a polypeptide encoded by a HLDGC gene can comprise a detectable label, such as a fluorescent, radioisotopic, chemiluminescent, or enzymatic label (for example, alkaline phosphatase, horseradish peroxidase, or luciferase). Detection of a test compound which is bound to a polypeptide encoded by a HLDGC gene can then be determined via direct counting of radioemmission, by scintillation counting, or by determining conversion of an appropriate substrate to a detectable product.

[0243] Determining the ability of a test compound to bind to a HLDGC protein also can be accomplished using real-time Biamolecular Interaction Analysis (BIA) [McConnell et al., 1992, Science 257, 1906-1912; Sjolander, Urbaniczky, 1991, Anal. Chem. 63, 2338-2345]. BIA is a technology for studying biospecific interactions in real time, without labeling any of the interactants (for example, BIA-core™). Changes in the optical phenomenon surface plasmon resonance (SPR) can be used as an indication of real-time reactions between biological molecules.

[0244] To identify other proteins which bind to or interact with a HLDGC protein and modulate its activity, a polypeptide encoded by a HLDGC gene can be used as a bait protein in a two-hybrid assay or three-hybrid assay (Szabo et al., 1995, Curr. Opin. Struct. Biol. 5, 699-705; U.S. Pat. No. 5,283,317), according to methods practiced in the art. The two-hybrid system is based on the modular nature of most transcription factors, which consist of separable DNA-binding and activation domains.

[0245] Functional Assays.

[0246] Test compounds can be tested for the ability to increase or decrease the activity of a HLDGC protein, or a variant thereof. Activity can be measured after contacting a purified HLDGC protein, a cell membrane preparation, or an intact cell with a test compound. A test compound that decreases the activity of a HLDGC protein by at least about 10%, at least about 20%, at least about 30%, at least about 40%, at least about 50%, at least about 60%, at least about 70%, at least about 75%, at least about 80%, at least about 90%, at least about 95% or 100% is identified as a potential agent for decreasing the activity of a HLDGC protein, for example an antagonist. A test compound that increases the activity of a HLDGC protein by at least about 10%, at least about 20%, at least about 30%, at least about 40%, at least about 50%, at least about 60%, at least about 70%, at least about 75%, at least about 80%, at least about 90%, at least about 95% or 100% is identified as a potential agent for increasing the activity of a HLDGC protein, for example an agonist.

[0247] Diagnosis

[0248] The invention provides methods to diagnose whether or not a subject is susceptible to or has a hair loss disorder. The diagnostic methods, in one embodiment, are based on monitoring the expression of HLDGC genes, such as CTLA-4, IL-2, IL-21, IL-2RA/CD25, IKZF4, a HLA Region residing gene, PTGER4, PRDX5, STX17, NKG2D, ULBP6, ULBP3, HDAC4, CACNA2D3, IL-13, IL-6, CHCHD3, CSMD1, IFNG, IL-26, KIAA0350 (CLEC16A), SOCS1, ANKRD12, or PTPN2, in a subject, for example whether they are increased or decreased as compared to a normal sample. In one embodiment, the HLA Region residing gene is selected from the group consisting of a gene of the HLA Class I Region, a gene of the HLA Class II Region, PTPN22, and AIRE. In one embodiment, the HLA Class I Region gene is HLA-A, HLA-B, HLA-C, HLA-DQB1, HLA-DRB1MICA, MICB-, HLA-G, or NOTCH4. In one embodiment, the HLA Class II Region gene is HLA-DOB, HLA-DQA1, HLA-DQA2, HLA-DQB2, TAP2, or HLA-DRA. As used herein, the term “diagnosis” includes the detection, typing, monitoring, dosing, comparison, at various stages, including early, pre-symptomatic stages, and late stages, in adults and children. Diagnosis can include the assessment of a predisposition or risk of development, the prognosis, or the characterization of a subject to define most appropriate treatment (pharmacogenetics).

[0249] The invention provides diagnostic methods to determine whether an individual is at risk of developing a hair-loss disorder, or suffers from a hair-loss disorder, wherein the disease results from an alteration in the expression of HLDGC genes. In one embodiment, a method of detecting the presence of or a predisposition to a hair-loss disorder in a subject is provided. The subject can be a human or a child thereof. The method can comprise detecting in a sample from the subject whether or not there is an alteration in the level of expression of a protein encoded by a HLDGC gene in the subject as compared to the level of expression in a subject not afflicted with a hair-loss disorder. In one embodiment, the detecting can comprise determining whether mRNA expression of the HLDGC is increased or decreased. For example, in a microarray assay, one can look for differential expression of a HLDGC gene. Any expression of a HLDGC gene that is either 2× higher or 2× lower than HLDGC expression expression observed for a subject not afflicted with a hair-loss disorder (as indicated by a fluorescent read-out) is deemed not normal, and worthy of further investigation. The detecting can also comprise determining in the sample whether expression of at least 2 HLDGC proteins, at least 3 HLDGC proteins, at least 4 HLDGC proteins, at least 5 HLDGC proteins, at least 6 HLDGC proteins, at least 6 HLDGC proteins, at least 7 HLDGC proteins, or at least 8 HLDGC proteins is increased or decreased. The presence of such an alteration is indicative of the presence or predisposition to a hair-loss disorder.

[0250] In another embodiment, the method comprises obtaining a biological sample from a human subject and detecting the presence of a single nucleotide polymorphism (SNP) in a chromosome region containing a HLDGC gene in the subject, wherein the SNP is selected from the SNPs listed in Table 2. The SNP can comprise a single nucleotide change, or a cluster of SNPs in and around a HLDGC gene. In one embodiment, the chromosome region comprises region 2q33.2, region 4q27, region 4q31.3, region 5p13.1, region 6q25.1, region 9q31.1, region 10p15.1, region 11q13, region 12q13, region 6p21.32, or a combination thereof. In some embodiments, the single nucleotide polymorphism is selected from any one of the SNPs listed in Table 2. In further embodiments, the single nucleotide polymorphism is selected from the group consisting of rs1024161, rs3096851, rs7682241, rs361147, rs10053502, rs9479482, rs2009345, rs10760706, rs4147359, rs3118470, rs694739, rs1701704, rs705708, rs9275572, rs16898264, rs3130320, rs3763312, and rs6910071. The presence of such SNP is indicative of the presence or predisposition to a hair-loss disorder. Non-limiting examples of hair-loss disorders include androgenetic alopecia, Alopecia areata, Alopecia areata, alopecia totalis, or alopecia universalis.

[0251] The presence of an alteration in a HLDGC gene in the sample is detected through the genotyping of a sample, for example via gene sequencing, selective hybridization, amplification, gene expression analysis, or a combination thereof. In one embodiment, the sample can comprise blood, serum, sputum, lacrimal secretions, semen, vaginal secretions, fetal tissue, skin tissue, epithelial tissue, muscle tissue, amniotic fluid, or a combination thereof.

[0252] The invention provides for a diagnostic kit used to determine whether a sample from a subject exhibits increased expression of at least 2 or more HLDGC genes. In one embodiment, the kit comprising a nucleic acid primer that specifically hybridizes to one or more HLDGC genes. The invention also provides for a diagnostic kit used to determine whether a sample from a subject exhibits a predisposition to a hair-loss disorder in a human subject. In one embodiment, the kit comprises a nucleic acid primer that specifically hybridizes to a single nucleotide polymorphism (SNP) in a chromosome region containing a HLDGC gene, wherein the primer will prime a polymerase reaction only when a SNP of Table 2 is present.

[0253] In some embodiments, the primers comprise a nucleotide sequence selected from the group consisting of SEQ ID NOS: 25-40 in Table 9. In further embodiments, the HLDGC gene is CTLA-4, IL-2, IL-21, IL-2RA/CD25, IKZF4, a HLA Region residing gene, PTGER4, PRDX5, STX17, NKG2D, ULBP6, ULBP3, HDAC4, CACNA2D3, IL-13, IL-6, CHCHD3, CSMD1, IFNG, IL-26, KIAA0350 (CLEC16A), SOCS1, ANKRD12, or PTPN2. In other embodiments, the HLA Region residing gene is selected from the group consisting of a gene of the HLA Class I Region, a gene of the HLA Class II Region, PTPN22, and AIRE. In some embodiments, HLA Class I Region gene is HLA-A, HLA-B, HLA-C, HLA-DQB1, HLA-DRB1, MICA, MICB, HLA-G, or NOTCH4, while in some embodiments, the HLA Class II Region gene is HLA-DOB, HLA-DQA1, HLA-DQA2, HLA-DQB2, TAP2, or HLA-DRA.

[0254] The invention also provides a method for treating or preventing a hair-loss disorder in a subject. In one embodiment, the method comprises detecting the presence of an alteration in a HLDGC gene in a sample from the subject, the presence of the alteration being indicative of a hair-loss disorder, or the predisposition to a hair-loss disorder, and, administering to the subject in need a therapeutic treatment against a hair-loss disorder. The therapeutic treatment can be a drug administration (for example, a pharmaceutical composition comprising a siRNA directed to a HLDGC nucleic acid). In some embodiments, the siRNA is directed to ULBP3 or ULBP6. In one embodiment, the molecule comprises a polypeptide encoded by a HLDGC gene, such as CTLA-4, IL-2, IL-21, IL-2RA/CD25, IKZF4, a HLA Region residing gene, PTGER4, PRDX5, STX17, NKG2D, ULBP6, ULBP3, HDAC4, CACNA2D3, IL-13, IL-6, CHCHD3, CSMD1, IFNG, IL-26, KIAA0350 (CLEC16A), SOCS1, ANKRD12, or PTPN2 comprising at least about 75%, at least about 80%, at least about 85%, at least about 90%, at least about 93%, at least about 95%, at least about 97%, at least about 98%, at least about 99%, or 100% of the amino acid sequence of SEQ ID NO: 1, 3, 5, 7, 9, 11, 13, 15, 17, 19, 21, or 23, and exhibits the function of decreasing expression of a protein encoded by a HLDGC gene. This can restore the capacity to initiate hair growth in cells derived from hair follicles or skin. In another embodiment, the molecule comprises a nucleic acid sequence comprising a HLDGC gene that encodes a polypeptide, comprising at least about 75%, at least about 80%, at least about 85%, at least about 90%, at least about 93%, at least about 95%, at least about 97%, at least about 98%, at least about 99%, or 100% of the nucleic acid sequence of SEQ ID NO: 2, 4, 6, 8, 10, 12, 14, 16, 18, 20, 22, or 24 and encodes a polypeptide with the function of decreasing expression of a protein encoded by a HLDGC gene, such as CTLA-4, IL-2, IL-21, IL-2RA/CD25, IKZF4, a HLA Region residing gene, PTGER4, PRDX5, STX17, NKG2D, ULBP6, ULBP3, HDAC4, CACNA2D3, IL-13, IL-6, CHCHD3, CSMD1, IFNG, IL-26, KIAA0350 (CLEC16A), SOCS1, ANKRD12, or PTPN2, thus restoring the capacity to initiate hair growth in cells derived from hair follicle cells or skin.

[0255] The alteration can be determined at the level of the DNA, RNA, or polypeptide. Optionally, detection can be determined by performing an oligonucleotide ligation assay, a confirmation based assay, a hybridization assay, a sequencing assay, an allele-specific amplification assay, a microsequencing assay, a melting curve analysis, a denaturing high performance liquid chromatography (DHPLC) assay (for example, see Jones et al, (2000) Hum Genet., 106(6):663-8), or a combination thereof. In another embodiment, the detection is performed by sequencing all or part of a HLDGC gene or by selective hybridization or amplification of all or part of a HLDGC gene. A HLDGC gene specific amplification can be carried out before the alteration identification step.

[0256] An alteration in a chromosome region occupied by a gene of a HLDGC can be any form of mutation(s), deletion(s), rearrangement(s) and/or insertions in the coding and/or non-coding region of the locus, alone or in various combination(s). Mutations can include point mutations. Insertions can encompass the addition of one or several residues in a coding or non-coding portion of the gene locus. Insertions can comprise an addition of between 1 and 50 base pairs in the gene locus. Deletions can encompass any region of one, two or more residues in a coding or non-coding portion of the gene locus, such as from two residues up to the entire gene or locus. Deletions can affect smaller regions, such as domains (introns) or repeated sequences or fragments of less than about 50 consecutive base pairs, although larger deletions can occur as well. Rearrangement includes inversion of sequences. The alteration in a chromosome region occupied by a HLDGC gene can result in amino acid substitutions, RNA splicing or processing, product instability, the creation of stop codons, frame-shift mutations, and/or truncated polypeptide production. The alteration can result in the production of a polypeptide encoded by a HLDGC gene with altered function, stability, targeting or structure. The alteration can also cause a reduction, or even an increase in protein expression. In one embodiment, the alteration in the chromosome region occupied by a gene of a HLDGC can comprise a point mutation, a deletion, or an insertion in a HLDGC gene or corresponding expression product. In another embodiment, the alteration can be a deletion or partial deletion of a HLDGC gene. The alteration can be determined at the level of the DNA, RNA, or polypeptide.

[0257] In another embodiment, the method can comprise detecting the presence of altered RNA expression. Altered RNA expression includes the presence of an altered RNA sequence, the presence of an altered RNA splicing or processing, or the presence of an altered quantity of RNA. These can be detected by various techniques known in the art, including sequencing all or part of the RNA or by selective hybridization or selective amplification of all or part of the RNA. In a further embodiment, the method can comprise detecting the presence of altered expression of a polypeptide encoded by a HLDGC gene. Altered polypeptide expression includes the presence of an altered polypeptide sequence, the presence of an altered quantity of polypeptide, or the presence of an altered tissue distribution. These can be detected by various techniques known in the art, including by sequencing and/or binding to specific ligands (such as antibodies).

[0258] Various techniques known in the art can be used to detect or quantify altered gene or RNA expression or nucleic acid sequences, which include, but are not limited to, hybridization, sequencing, amplification, and/or binding to specific ligands (such as antibodies). Other suitable methods include allele-specific oligonucleotide (ASO), oligonucleotide ligation, allele-specific amplification, Southern blot (for DNAs), Northern blot (for RNAs), single-stranded conformation analysis (SSCA), PFGE, fluorescent in situ hybridization (FISH), gel migration, clamped denaturing gel electrophoresis, denaturing HLPC, melting curve analysis, heteroduplex analysis, RNase protection, chemical or enzymatic mismatch cleavage, ELISA, radio-immunoassays (RIA) and immuno-enzymatic assays (IEMA). Some of these approaches (such as SSCA and CGGE) are based on a change in electrophoretic mobility of the nucleic acids, as a result of the presence of an altered sequence. According to these techniques, the altered sequence is visualized by a shift in mobility on gels. The fragments can then be sequenced to confirm the alteration. Some other approaches are based on specific hybridization between nucleic acids from the subject and a probe specific for wild type or altered gene or RNA. The probe can be in suspension or immobilized on a substrate. The probe can be labeled to facilitate detection of hybrids. Some of these approaches are suited for assessing a polypeptide sequence or expression level, such as Northern blot, ELISA and RIA. These latter require the use of a ligand specific for the polypeptide, for example, the use of a specific antibody.

[0259] Sequencing.

[0260] Sequencing can be carried out using techniques well known in the art, using automatic sequencers. The sequencing can be performed on the complete HLDGC gene or on specific domains thereof, such as those known or suspected to carry deleterious mutations or other alterations.

[0261] Amplification.

[0262] Amplification is based on the formation of specific hybrids between complementary nucleic acid sequences that serve to initiate nucleic acid reproduction. Amplification can be performed according to various techniques known in the art, such as by polymerase chain reaction (PCR), ligase chain reaction (LCR), strand displacement amplification (SDA) and nucleic acid sequence based amplification (NASBA). These techniques can be performed using commercially available reagents and protocols. Useful techniques in the art encompass real-time PCR, allele-specific PCR, or PCR-SSCP. Amplification usually requires the use of specific nucleic acid primers, to initiate the reaction. Nucleic acid primers useful for amplifying sequences from a HLDGC gene or locus are able to specifically hybridize with a portion of a HLDGC gene locus that flank a target region of the locus, wherein the target region is altered in certain subjects having a hair-loss disorder. In one embodiment, amplification can comprise using forward and reverse PCR primers comprising nucleotide sequences of SEQ ID NOS: 25, 27, 29, 31, 33, 35, 37, or 39, and SEQ ID NOS: 26, 28, 30, 32, 34, 36, 38, or 40, respectively (See Table 9).

[0263] The invention provides for a nucleic acid primer, wherein the primer can be complementary to and hybridize specifically to a portion of a HLDGC coding sequence (e.g., gene or RNA) altered in certain subjects having a hair-loss disorder. Primers of the invention can be specific for altered sequences in a HLDGC gene or RNA. By using such primers, the detection of an amplification product indicates the presence of an alteration in a HLDGC gene or the absence of such gene. Primers can also be used to identify single nucleotide polymorphisms (SNPs) located in or around a HLDGC gene locus; SNPs can comprise a single nucleotide change, or a cluster of SNPs in and around a HLDGC gene. Examples of primers of this invention can be single-stranded nucleic acid molecules of about 5 to 60 nucleotides in length, or about 8 to about 25 nucleotides in length. The sequence can be derived directly from the sequence of a HLDGC gene. Perfect complementarity is useful to ensure high specificity; however, certain mismatch can be tolerated. For example, a nucleic acid primer or a pair of nucleic acid primers as described above can be used in a method for detecting the presence of or a predisposition to a hair-loss disorder in a subject.

[0264] Amplification methods include, e.g., polymerase chain reaction, PCR (PCR PROTOCOLS, A GUIDE TO METHODS AND APPLICATIONS, ed. Innis, Academic Press, N.Y., 1990 and PCR STRATEGIES, 1995, ed. Innis, Academic Press, Inc., N.Y., ligase chain reaction (LCR) (see, e.g., Wu, Genomics 4:560, 1989; Landegren, Science 241:1077, 1988; Barringer, Gene 89:117, 1990); transcription amplification (see, e.g., Kwoh, Proc. Natl. Acad. Sci. USA 86:1173, 1989); and, self-sustained sequence replication (see, e.g., Guatelli, Proc. Natl. Acad. Sci. USA 87:1874, 1990); Q Beta replicase amplification (see, e.g., Smith, J. Clin. Microbiol. 35:1477-1491, 1997), automated Q-beta replicase amplification assay (see, e.g., Burg, Mol. Cell. Probes 10:257-271, 1996) and other RNA polymerase mediated techniques (e.g., NASBA, Cangene, Mississauga, Ontario); see also Berger, Methods Enzymol. 152:307-316, 1987; Sambrook; Ausubel; U.S. Pat. Nos. 4,683,195 and 4,683,202; Sooknanan, Biotechnology 13:563-564, 1995. All the references stated above, an throughout the description, are incorporated by reference in their entireties.

[0265] Selective Hybridization.

[0266] Hybridization detection methods are based on the formation of specific hybrids between complementary nucleic acid sequences that serve to detect nucleic acid sequence alteration(s). A detection technique involves the use of a nucleic acid probe specific for wild type or altered gene or RNA, followed by the detection of the presence of a hybrid. The probe can be in suspension or immobilized on a substrate or support (for example, as in nucleic acid array or chips technologies). The probe can be labeled to facilitate detection of hybrids. For example, a sample from the subject can be contacted with a nucleic acid probe specific for a wild type HLDGC gene or an altered HLDGC gene, and the formation of a hybrid can be subsequently assessed. In one embodiment, the method comprises contacting simultaneously the sample with a set of probes that are specific, respectively, for a wild type HLDGC gene and for various altered forms thereof. Thus, it is possible to detect directly the presence of various forms of alterations in a HLDGC gene in the sample. Also, various samples from various subjects can be treated in parallel.

[0267] According to the invention, a probe can be a polynucleotide sequence which is complementary to and can specifically hybridize with a (target portion of a) HLDGC gene or RNA, and that is suitable for detecting polynucleotide polymorphisms associated with alleles of a HLDGC gene (or genes) which predispose to or are associated with a hair-loss disorder. Useful probes are those that are complementary to a HLDGC gene, RNA, or target portion thereof. Probes can comprise single-stranded nucleic acids of between 8 to 1000 nucleotides in length, for instance between 10 and 800, between 15 and 700, or between 20 and 500. Longer probes can be used as well. A useful probe of the invention is a single stranded nucleic acid molecule of between 8 to 500 nucleotides in length, which can specifically hybridize to a region of a HLDGC gene or RNA that carries an alteration. For example, the probe can be directed to a chromosome region occupied by a HLDGC gene, such as CTLA-4, IL-2, IL-21, IL-2RA/CD25, IKZF4, a HLA Region residing gene, PTGER4, PRDX5, STX17, NKG2D, ULBP6, ULBP3, HDAC4, CACNA2D3, IL-13, IL-6, CHCHD3, CSMD1, IFNG, IL-26, KIAA0350 (CLEC16A), SOCS1, ANKRD12, or PTPN2. In one embodiment, the HLA Region residing gene is selected from the group consisting of a gene of the HLA Class I Region, a gene of the HLA Class II Region, PTPN22, and AIRE. In one embodiment, the HLA Class I Region gene is HLA-A, HLA-B, HLA-C, HLA-DQB1, HLA-DRB1, MICA, MICB, HLA-G, or NOTCH4. In one embodiment, the HLA Class II Region gene is HLA-DOB, HLA-DQA1, HLA-DQA2, HLA-DQB2, TAP2, or HLA-DRA. In one embodiment, the chromosome region comprises region 2q33.2, region 4q27, region 4q31.3, region 5p13.1, region 6q25.1, region 9q31.1, region 10p15.1, region 11q13, region 12q13, region 6p21.32, or a combination thereof.

[0268] The sequence of the probes can be derived from the sequences of a HLDGC gene and RNA as provided herein. Nucleotide substitutions can be performed, as well as chemical modifications of the probe. Such chemical modifications can be accomplished to increase the stability of hybrids (e.g., intercalating groups) or to label the probe. Some examples of labels include, without limitation, radioactivity, fluorescence, luminescence, and enzymatic labeling.

[0269] A guide to the hybridization of nucleic acids is found in e.g., Sambrook, ed., Molecular Cloning: A Laboratory Manual (3^{rd} Ed.), Vols. 1-3, Cold Spring Harbor Laboratory, 2001; Current Protocols in Molecular Biology, Ausubel, ed. John Wiley & Sons, Inc., New York, 1997; Laboratory Techniques in Biochemistry and Molecular Biology: Hybridization with Nucleic Acid Probes, Part I. Theory and Nucleic Acid Preparation, Tijssen, ed. Elsevier, N.Y., 1993.

[0270] DNA Microarrays.

[0271] An approach to detecting gene expression or nucleotide variation involves using nucleic acid arrays placed on chips. This technology has been exploited by companies such as Affymetrix and Illumina, and a large number of technologies are commercially available (see also the following reviews: Grant and Hakonarson, 2008, Clinical Chemistry, 54(7): 1116-1124; Curtis et al., 2009, BMC Genomics, 10:588; and Syvänen, 2005, Nature Genetics, 37:S5-S10, each of which are hereby incorporated by reference in their entireties). Useful array technologies include, but are not limited to, chip-based DNA technologies such as those described by Hacia et al. (Nature Genet., 14:441-449, 1996) and Shoemaker et al. (Nature Genetics, 14:450-456, 1996). These techniques involve quantitative methods for analyzing large numbers of sequences rapidly and accurately (see Erdogan et al., 2001, Nuc Acids Res, 29(7):e36 and Bier et al., 2008, Adv. Biochem Engin/Biotechnol, 109:433-453, each of which are hereby incorporated by reference in their entireties). The technology exploits the complementary binding properties of single stranded DNA to screen DNA samples by hybridization (Pease et al., Proc. Natl. Acad. Sci. USA, 91:5022-5026, 1994; Fodor et al., Science, 251:767-773, 1991).

[0272] A microarray or gene chip can comprise a solid substrate to which an array of single-stranded DNA molecules has been attached. For screening, the chip or microarray is contacted with a single-stranded DNA sample, which is allowed to hybridize under stringent conditions. The chip or microarray is then scanned to determine which probes have hybridized. For example see methods discussed in Bier et al., 2008, Adv. Biochem Engin/Biotechnol, 109:433-453. In a some embodiments, a chip or microarray can comprise probes specific for SNPs evidencing the predisposition towards the development of a hairloss disorder. Such probes can include PCR products amplified from patient DNA synthesized oligonucleotides, cDNA, genomic DNA, yeast artificial chromosomes (YACs), bacterial artificial chromosomes (BACs), chromosomal markers or other constructs a person of ordinary skill would recognize as adequate to demonstrate a genetic change. In some embodiments, the cDNA- or oligonucleotide-microarray comprises SEQ ID NOS: 2, 4, 6, 8, 10, 12, 14, 16, 18, 20, 22, 24, or a combination thereof. In other embodiments, the cDNA- or oligonucleotide-microarray comprises SNPs listed in Table 2. In further embodiments, the cDNA- or oligonucleotide-microarray comprises SNPs rs1024161, rs3096851, rs7682241, rs361147, rs10053502, rs9479482, rs2009345, rs10760706, rs4147359, rs3118470, rs694739, rs1701704, rs705708, rs9275572, rs16898264, rs3130320, rs3763312, or rs6910071.

[0273] Gene chip or microarray formats are described in the art, for example U.S. Pat. Nos. 5,861,242 and 5,578,832, which are expressly incorporated herein by reference. A means for applying the disclosed methods to the construction of such a chip or array would be clear to one of ordinary skill in the art. In brief, the basic structure of a gene chip or array comprises: (1) an excitation source; (2) an array of nucleic acid probes; (3) a sampling element; (4) a detector; and (5) a signal amplification/treatment system. A chip may also include a support for immobilizing the probe.

[0274] Arrays of nucleic acids can be generated by any number of known methods including photolithography, pipette, drop-touch, piezoelectric, spotting, and electric procedures. The DNA microarrays generally have probes that are supported by a substrate so that a target sample is bound or hybridized with the probes. In use, the microarray surface is contacted with one or more target samples under conditions that promote specific, high-affinity binding of the target to one or more of the probes. A sample solution containing the target sample can comprise fluorescently, radioactive, or chemoluminescently labeled molecules that are detectable. The hybridized targets and probes can also be detected by voltage, current, or electronic means known in the art.

[0275] Various techniques can be used to prepare an oligonucleotide for use in a microarray. In situ synthesis of oligonucleotide or polynucleotide probes on a substrate can be performed according to chemical processes known in the art, such as sequential addition of nucleotide phosphoramidites to surface-linked hydroxyl groups. Indirect synthesis may also be performed via biosynthetic techniques such as PCR. Other methods of oligonucleotide synthesis include phosphotriester and phosphodiester methods and synthesis on a support, as well as phosphoramidate techniques. Chemical synthesis via a photolithographic method of spatially addressable arrays of oligonucleotides bound to a substrate made of glass can also be employed.

[0276] The probes or oligonucleotides can be obtained by biological synthesis or by chemical synthesis. Chemical synthesis allows for low molecular weight compounds and/or modified bases to be incorporated during specific synthesis steps. Furthermore, chemical synthesis is very flexible in the choice of length and region of target polynucleotides binding sequence. The oligonucleotide can be synthesized by standard methods such as those used in commercial automated nucleic acid synthesizers.

[0277] For example, probes or oligonucleotides may be directly or indirectly immobilized onto a surface to ensure optimal contact and maximum detection. The ability to directly synthesize on or attach polynucleotide probes to solid substrates is well known in the art; for example, see U.S. Pat. Nos. 5,837,832 and 5,837,860, both of which are expressly incorporated by reference.

[0278] A variety of methods have been utilized to either permanently or removably attach probes or oligonucleotides to the substrate. Exemplary methods include: the immobilization of biotinylated nucleic acid molecules to avidin/streptavidin coated supports (Holmstrom, Anal. Biochem. 209:278-283, 1993), the direct covalent attachment of short, 5′-phosphorylated primers to chemically modified polystyrene plates (Rasmussen et al., Anal. Biochem, 198:138-142, 1991), or the precoating of the polystyrene or glass solid phases with poly-L-Lys or poly L-Lys, Phe, followed by the covalent attachment of either amino- or sulfhydryl-modified oligonucleotides using bi-functional crosslinking reagents (Running et al., BioTechniques 8:276-277, 1990; Newton et al., Nucl. Acids Res. 21:1155-1162, 1993).

[0279] When immobilized onto a substrate, the probes or oligonucleotides are stabilized and therefore may be used repeatedly. Hybridization is performed on an immobilized nucleic acid that is attached to a solid surface such as nitrocellulose, nylon membrane or glass. Numerous other matrix materials may be used, including reinforced nitrocellulose membrane, activated quartz, activated glass, polyvinylidene difluoride (PVDF) membrane, polystyrene substrates, polyacrylamide-based substrate, other polymers such as poly(vinyl chloride), poly(methyl methacrylate), poly(dimethyl siloxane), and photopolymers (which contain photoreactive species such as nitrenes, carbenes and ketyl radicals) that can form covalent links with target. molecules.

[0280] Binding of the probes or oligonucleotides to a selected support may be accomplished by any of several means. For example, DNA is commonly bound to glass by first silanizing the glass surface, then activating with carbodimide or glutaraldehyde. Alternative procedures may use reagents such as 3-glycidoxypropyltrimethoxysilane (GOP) or aminopropyltrimethoxysilane (APTS) with DNA linked via amino linkers incorporated either at the 3′ or 5′ end of the molecule during DNA synthesis. DNA probes or oligonucleotides may be bound directly to membranes using ultraviolet radiation. With nitrocellose membranes, the DNA probes or oligonucleotides are spotted onto the membranes. A UV light source (Stratalinker™, Stratagene, La Jolla, Calif.) is used to irradiate DNA spots and induce cross-linking. An alternative method for cross-linking involves baking the spotted membranes at 80° C. for two hours in vacuum.

[0281] Specific DNA probes or oligonucleotides can first be immobilized onto a membrane and then attached to a membrane in contact with a transducer detection surface. This method avoids binding the probe onto the transducer and may be desirable for large-scale production. Membranes suitable for this application include nitrocellulose membrane (e.g., from BioRad, Hercules, Calif.) or polyvinylidene difluoride (PVDF) (BioRad, Hercules, Calif.) or nylon membrane (Zeta-Probe, BioRad) or polystyrene base substrates (DNA.BIND™ Costar, Cambridge, Mass.).

[0282] Specific Ligand Binding.

[0283] As discussed herein, alteration in a chromosome region occupied by a HLDGC gene or alteration in expression of a HLDGC gene, such as CTLA-4, IL-2, IL-21, IL-2RA/CD25, IKZF4, a HLA Region residing gene, PTGER4, PRDX5, STX17, NKG2D, ULBP6, ULBP3, HDAC4, CACNA2D3, IL-13, IL-6, CHCHD3, CSMD1, IFNG, IL-26, KIAA0350 (CLEC16A), SOCS1, ANKRD12, or PTPN2, can also be detected by screening for alteration(s) in a sequence or expression level of a polypeptide encoded by a HLDGC gene. Different types of ligands can be used, such as specific antibodies. In one embodiment, the sample is contacted with an antibody specific for a polypeptide encoded by a HLDGC gene and the formation of an immune complex is subsequently determined. Various methods for detecting an immune complex can be used, such as ELISA, radioimmunoassays (RIA) and immuno-enzymatic assays (IEMA).

[0284] For example, an antibody can be a polyclonal antibody, a monoclonal antibody, as well as fragments or derivatives thereof having substantially the same antigen specificity. Fragments include Fab, Fab′2, or CDR regions. Derivatives include single-chain antibodies, humanized antibodies, or poly-functional antibodies. An antibody specific for a polypeptide encoded by a HLDGC gene (such as CTLA-4, IL-2, IL-21, IL-2RA/CD25, IKZF4, a HLA Region residing gene, PTGER4, PRDX5, STX17, NKG2D, ULBP6, ULBP3, HDAC4, CACNA2D3, IL-13, IL-6, CHCHD3, CSMD1, IFNG, IL-26, KIAA0350 (CLEC16A), SOCS1, ANKRD12, or PTPN2) can be an antibody that selectively binds such a polypeptide, namely, an antibody raised against a polypeptide encoded by a HLDGC gene or an epitope-containing fragment thereof. Although non-specific binding towards other antigens can occur, binding to the target polypeptide occurs with a higher affinity and can be reliably discriminated from non-specific binding. In one embodiment, the method can comprise contacting a sample from the subject with an antibody specific for a wild type or an altered form of a polypeptide encoded by a HLDGC gene, and determining the presence of an immune complex. Optionally, the sample can be contacted to a support coated with antibody specific for the wild type or altered form of a polypeptide encoded by a HLDGC gene. In one embodiment, the sample can be contacted simultaneously, or in parallel, or sequentially, with various antibodies specific for different forms of a polypeptide encoded by a HLDGC gene, such as a wild type and various altered forms thereof.

[0285] As discussed herein, the invention also provides for a diagnostic kit comprising products and reagents for detecting in a sample obtained from a subject the presence of an alteration in one or more HLDGC genes or polypeptides thereof, the expression of one or more HLDGC genes or polypeptide thereof, the presence of a HLDGC-specific SNP (for example, those SNPs listed in Table 2), and/or the activity of one or more HLDGC genes. The kit can be useful for determining whether a sample from a subject exhibits reduced expression of a HLDGC gene or of a protein encoded by a HLDGC gene, or exhibits a deletion or alteration in one or more HLDGC genes. For example, the diagnostic kit according to the present invention comprises any primer, any pair of primers, any nucleic acid probe and/or any ligand, (for example, an antibody directed against polypeptides encoded by HLDGC gene(s)), described in the present invention. The diagnostic kit according to the present invention can further comprise reagents and/or protocols for performing a hybridization, amplification or antigen-antibody immune reaction. In one embodiment, the kit can comprise nucleic acid primers that specifically hybridize to and can prime a polymerase reaction from nucleic acid sequences comprising a gene of a HLDGC that encode a polypeptide of such. In another embodiment, the primer comprises any one of the nucleotide sequences of Table 9.

[0286] The diagnosis methods can be performed in vitro, ex vivo, or in vivo, using a sample from the subject, to assess the status of a chromosome region occupied by a gene of the HLDGC. The sample can be any biological sample derived from a subject, which contains nucleic acids or polypeptides. Examples of such samples include, but are not limited to, fluids, tissues, cell samples, organs, or tissue biopsies. Non-limiting examples of samples include blood, plasma, saliva, urine, or seminal fluid. Pre-natal diagnosis can also be performed by testing fetal cells or placental cells, for instance. Screening of parental samples can also be used to determine risk/likelihood of offspring possessing the germline mutation. The sample can be collected according to conventional techniques and used directly for diagnosis or stored. The sample can be treated prior to performing the method, in order to render or improve availability of nucleic acids or polypeptides for testing. Treatments include, for instance, lysis (e.g., mechanical, physical, or chemical), centrifugation. Also, the nucleic acids and/or polypeptides can be pre-purified or enriched by conventional techniques, and/or reduced in complexity. Nucleic acids and polypeptides can also be treated with enzymes or other chemical or physical treatments to produce fragments thereof. In one embodiment, the sample is contacted with reagents such as probes, primers, or ligands in order to assess the presence of an altered chromosome region occupied by a HLDGC gene or the presence of a HLDGC-specific SNP (for example, those SNPs listed in Table 2). Contacting can be performed in any suitable device, such as a plate, tube, well, array chip, or glass. In specific embodiments, the contacting is performed on a substrate coated with the reagent, such as a nucleic acid array or a specific ligand array. The substrate can be a solid or semi-solid substrate such as any support comprising glass, plastic, nylon, paper, metal, or polymers. The substrate can be of various forms and sizes, such as a slide, a membrane, a bead, a column, or a gel. The contacting can be made under any condition suitable for a complex to be formed between the reagent and the nucleic acids or polypeptides of the sample.

[0287] Identifying an altered polypeptide, RNA, or DNA in the sample is indicative of the presence of an altered HLDGC gene (such as CTLA-4, IL-2, IL-21, IL-2RA/CD25, IKZF4, a HLA Region residing gene, PTGER4, PRDX5, STX17, NKG2D, ULBP6, ULBP3, HDAC4, CACNA2D3, IL-13, IL-6, CHCHD3, CSMD1, IFNG, IL-26, KIAA0350 (CLEC16A), SOCS1, ANKRD12, or PTPN2) in the subject, which can be correlated to the presence, predisposition or stage of progression of a hair-loss disorder. For example, an individual having a germ line mutation has an increased risk of developing a hair-loss disorder. The determination of the presence of an altered chromosome region occupied by a gene of a HLDGC in a subject also allows the design of appropriate therapeutic intervention, which is more effective and customized. Also, this determination at the pre-symptomatic level allows a preventive regimen to be applied.

[0288] Gene Therapy and Protein Replacement Methods

[0289] Delivery of nucleic acids into viable cells can be effected ex vivo, in situ, or in vivo by use of vectors, such as viral vectors (e.g., lentivirus, adenovirus, adeno-associated virus, or a retrovirus), or ex vivo by use of physical DNA transfer methods (e.g., liposomes or chemical treatments). Non-limiting techniques suitable for the transfer of nucleic acid into mammalian cells in vitro include the use of liposomes, electroporation, microinjection, cell fusion, DEAE-dextran, and the calcium phosphate precipitation method (See, for example, Anderson, Nature, supplement to vol. 392, no. 6679, pp. 25-20 (1998)). Introduction of a nucleic acid or a gene encoding a polypeptide of the invention can also be accomplished with extrachromosomal substrates (transient expression) or artificial chromosomes (stable expression). Cells may also be cultured ex vivo in the presence of therapeutic compositions of the present invention in order to proliferate or to produce a desired effect on or activity in such cells. Treated cells can then be introduced in vivo for therapeutic purposes.

[0290] Nucleic acids can be inserted into vectors and used as gene therapy vectors. A number of viruses have been used as gene transfer vectors, including papovaviruses, e.g., SV40 (Madzak et al., 1992), adenovirus (Berkner, 1992; Berkner et al., 1988; Gorziglia and Kapikian, 1992; Quantin et al., 1992; Rosenfeld et al., 1992; Wilkinson et al., 1992; Stratford-Perricaudet et al., 1990), vaccinia virus (Moss, 1992), adeno-associated virus (Muzyczka, 1992; Ohi et al., 1990), herpesviruses including HSV and EBV (Margolskee, 1992; Johnson et al., 1992; Fink et al., 1992; Breakfield and Geller, 1987; Freese et al., 1990), and retroviruses of avian (Biandyopadhyay and Temin, 1984; Petropoulos et al., 1992), murine (Miller, 1992; Miller et al., 1985; Sorge et al., 1984; Mann and Baltimore, 1985; Miller et al., 1988), and human origin (Shimada et al., 1991; Helseth et al., 1990; Page et al., 1990; Buchschacher and Panganiban, 1992). Non-limiting examples of in vivo gene transfer techniques include transfection with viral (e.g., retroviral) vectors (see U.S. Pat. No. 5,252,479, which is incorporated by reference in its entirety) and viral coat protein-liposome mediated transfection (Dzau et al., Trends in Biotechnology 11:205-210 (1993), incorporated entirely by reference). For example, naked DNA vaccines are generally known in the art; see Brower, Nature Biotechnology, 16:1304-1305 (1998), which is incorporated by reference in its entirety. Gene therapy vectors can be delivered to a subject by, for example, intravenous injection, local administration (see, e.g., U.S. Pat. No. 5,328,470) or by stereotactic injection (see, e.g., Chen, et al., 1994. Proc. Natl. Acad. Sci. USA 91: 3054-3057). The pharmaceutical preparation of the gene therapy vector can include the gene therapy vector in an acceptable diluent, or can comprise a slow release matrix in which the gene delivery vehicle is imbedded. Alternatively, where the complete gene delivery vector can be produced intact from recombinant cells, e.g., retroviral vectors, the pharmaceutical preparation can include one or more cells that produce the gene delivery system.

[0291] For reviews of gene therapy protocols and methods see Anderson et al., Science 256:808-813 (1992); U.S. Pat. Nos. 5,252,479, 5,747,469, 6,017,524, 6,143,290, 6,410,010 6,511,847; and U.S. Application Publication Nos. 2002/0077313 and 2002/00069, which are all hereby incorporated by reference in their entireties. For additional reviews of gene therapy technology, see Friedmann, Science, 244:1275-1281 (1989); Verma, Scientific American: 68-84 (1990); Miller, Nature, 357: 455-460 (1992); Kikuchi et al., J Dermatol Sci. 2008 May; 50(2):87-98; Isaka et al., Expert Opin Drug Deliv. 2007 September; 4(5):561-71; Jager et al., Curr Gene Ther. 2007 August; 7(4):272-83; Waehler et al., Nat Rev Genet. 2007 August; 8(8):573-87; Jensen et al., Ann Med. 2007; 39(2):108-15; Herweijer et al., Gene Ther. 2007 January; 14(2):99-107; Eliyahu et al., Molecules, 2005 Jan. 31; 10(1):34-64; and Altaras et al., Adv Biochem Eng Biotechnol. 2005; 99:193-260, all of which are hereby incorporated by reference in their entireties.

[0292] Protein replacement therapy can increase the amount of protein by exogenously introducing wild-type or biologically functional protein by way of infusion. A replacement polypeptide can be synthesized according to known chemical techniques or may be produced and purified via known molecular biological techniques. Protein replacement therapy has been developed for various disorders. For example, a wild-type protein can be purified from a recombinant cellular expression system (e.g., mammalian cells or insect cells-see U.S. Pat. No. 5,580,757 to Desnick et al.; U.S. Pat. Nos. 6,395,884 and 6,458,574 to Selden et al.; U.S. Pat. No. 6,461,609 to Calhoun et al.; U.S. Pat. No. 6,210,666 to Miyamura et al.; U.S. Pat. No. 6,083,725 to Selden et al.; U.S. Pat. No. 6,451,600 to Rasmussen et al.; U.S. Pat. No. 5,236,838 to Rasmussen et al. and U.S. Pat. No. 5,879,680 to Ginns et al.), human placenta, or animal milk (see U.S. Pat. No. 6,188,045 to Reuser et al.), or other sources known in the art. After the infusion, the exogenous protein can be taken up by tissues through non-specific or receptor-mediated mechanism.

[0293] A polypeptide encoded by an HLDGC gene (for example, CTLA-4, IL-2, IL-21, IL-2RA/CD25, IKZF4, a HLA Region residing gene, PTGER4, PRDX5, STX17, NKG2D, ULBP6, ULBP3, HDAC4, CACNA2D3, IL-13, IL-6, CHCHD3, CSMD1, IFNG, IL-26, KIAA0350 (CLEC16A), SOCS1, ANKRD12, or PTPN2) can also be delivered in a controlled release system. For example, the polypeptide may be administered using intravenous infusion, an implantable osmotic pump, a transdermal patch, liposomes, or other modes of administration. In one embodiment, a pump may be used (see is Langer, supra; Sefton, CRC Crit. Ref. Biomed. Eng. 14:201 (1987); Buchwald et al., Surgery 88:507 (1980); Saudek et al., N. Engl. J. Med. 321:574 (1989)). In another embodiment, polymeric materials can be used (see Medical Applications of Controlled Release, Langer and Wise (eds.), CRC Pres., Boca Raton, Fla. (1974); Controlled Drug Bioavailability, Drug Product Design and Performance, Smolen and Ball (eds.), Wiley, New York (1984); Ranger and Peppas, J. Macromol. Sci. Rev. Macromol. Chem. 23:61 (1983); see also Levy et al., Science 228:190 (1985); During et al., Ann. Neurol. 25:351 (1989); Howard et al., J. Neurosurg. 71:105 (1989)). In yet another embodiment, a controlled release system can be placed in proximity of the therapeutic target thus requiring only a fraction of the systemic dose (see, e.g., Goodson, in Medical Applications of Controlled Release, supra, vol. 2, pp. 115-138 (1984)). Other controlled release systems are discussed in the review by Langer (Science 249:1527-1533 (1990)).

[0294] Pharmaceutical Compositions and Administration for Therapy

[0295] HLDGC proteins and HLDGC modulating compounds of the invention can be administered to the subject once (e.g., as a single injection or deposition). Alternatively, HLDGC proteins and HLDGC modulating compounds can be administered once or twice daily to a subject in need thereof for a period of from about two to about twenty-eight days, or from about seven to about ten days. HLDGC proteins and HLDGC modulating compounds can also be administered once or twice daily to a subject for a period of 1, 2, 3, 4, 5, 6, 7, 8, 9, 10, 11, 12 times per year, or a combination thereof. Furthermore, HLDGC proteins and HLDGC modulating compounds of the invention can be co-administrated with another therapeutic. Where a dosage regimen comprises multiple administrations, the effective amount of the HLDGC proteins and HLDGC modulating compounds administered to the subject can comprise the total amount of gene product administered over the entire dosage regimen.

[0296] HLDGC proteins and HLDGC modulating compounds can be administered to a subject by any means suitable for delivering the HLDGC proteins and HLDGC modulating compounds to cells of the subject, such as the dermis, epidermis, dermal papilla cells, or hair follicle cells. For example, HLDGC proteins and HLDGC modulating compounds can be administered by methods suitable to transfect cells. Transfection methods for eukaryotic cells are well known in the art, and include direct injection of the nucleic acid into the nucleus or pronucleus of a cell; electroporation; liposome transfer or transfer mediated by lipophilic materials; receptor mediated nucleic acid delivery, bioballistic or particle acceleration; calcium phosphate precipitation, and transfection mediated by viral vectors.

[0297] The compositions of this invention can be formulated and administered to reduce the symptoms associated with a hair-loss disorder by any means that produces contact of the active ingredient with the agent's site of action in the body of a subject, such as a human or animal (e.g., a dog, cat, or horse). They can be administered by any conventional means available for use in conjunction with pharmaceuticals, either as individual therapeutic active ingredients or in a combination of therapeutic active ingredients. They can be administered alone, but are generally administered with a pharmaceutical carrier selected on the basis of the chosen route of administration and standard pharmaceutical practice.

[0298] A therapeutically effective dose of HLDGC modulating compounds can depend upon a number of factors known to those or ordinary skill in the art. The dose(s) of the HLDGC modulating compounds can vary, for example, depending upon the identity, size, and condition of the subject or sample being treated, further depending upon the route by which the composition is to be administered, if applicable, and the effect which the practitioner desires the HLDGC modulating compounds to have upon the nucleic acid or polypeptide of the invention. These amounts can be readily determined by a skilled artisan. Any of the therapeutic applications described herein can be applied to any subject in need of such therapy, including, for example, a mammal such as a dog, a cat, a cow, a horse, a rabbit, a monkey, a pig, a sheep, a goat, or a human.

[0299] Pharmaceutical compositions for use in accordance with the invention can be formulated in conventional manner using one or more physiologically acceptable carriers or excipients. The therapeutic compositions of the invention can be formulated for a variety of routes of administration, including systemic and topical or localized administration. Techniques and formulations generally can be found in Remmington's Pharmaceutical Sciences, Meade Publishing Co., Easton, Pa. (20^{th} Ed., 2000), the entire disclosure of which is herein incorporated by reference. For systemic administration, an injection is useful, including intramuscular, intravenous, intraperitoneal, and subcutaneous. For injection, the therapeutic compositions of the invention can be formulated in liquid solutions, for example in physiologically compatible buffers such as Hank's solution or Ringer's solution. In addition, the therapeutic compositions can be formulated in solid form and redissolved or suspended immediately prior to use. Lyophilized forms are also included. Pharmaceutical compositions of the present invention are characterized as being at least sterile and pyrogen-free. These pharmaceutical formulations include formulations for human and veterinary use.

[0300] According to the invention, a pharmaceutically acceptable carrier can comprise any and all solvents, dispersion media, coatings, antibacterial and antifungal agents, isotonic and absorption delaying agents, and the like, compatible with pharmaceutical administration. The use of such media and agents for pharmaceutically active substances is well known in the art. Any conventional media or agent that is compatible with the active compound can be used. Supplementary active compounds can also be incorporated into the compositions.

[0301] The invention also provides for a kit that comprises a pharmaceutically acceptable carrier and a HLDGC modulating compound identified using the screening assays of the invention packaged with instructions for use. For modulators that are antagonists of the activity of a HLDGC protein, or which reduce the expression of a HLDGC protein, the instructions would specify use of the pharmaceutical composition for promoting the loss of hair on the body surface of a mammal (for example, arms, legs, bikini area, face).

[0302] For HLDGC modulating compounds that are agonists of the activity of a HLDGC protein or increase the expression of one or more proteins encoded by HLDGC genes (such as CTLA-4, IL-2, IL-21, IL-2RA/CD25, IKZF4, a HLA Region residing gene, PTGER4, PRDX5, STX17, NKG2D, ULBP6, ULBP3, HDAC4, CACNA2D3, IL-13, IL-6, CHCHD3, CSMD1, IFNG, IL-26, KIAA0350 (CLEC16A), SOCS1, ANKRD12, or PTPN2), the instructions would specify use of the pharmaceutical composition for regulating hair growth. In one embodiment, the instructions would specify use of the pharmaceutical composition for the treatment of hair loss disorders. In a further embodiment, the instructions would specify use of the pharmaceutical composition for restoring hair pigmentation. For example, administering an agonist can reduce hair graying in a subject.

[0303] A pharmaceutical composition containing a HLDGC modulating compound can be administered in conjunction with a pharmaceutically acceptable carrier, for any of the therapeutic effects discussed herein. Such pharmaceutical compositions can comprise, for example antibodies directed to polypeptides encoded by genes comprising a HLDGC or variants thereof, or agonists and antagonists of a polypeptide encoded by a HLDGC gene. The compositions can be administered alone or in combination with at least one other agent, such as a stabilizing compound, which can be administered in any sterile, biocompatible pharmaceutical carrier including, but not limited to, saline, buffered saline, dextrose, and water. The compositions can be administered to a patient alone, or in combination with other agents, drugs or hormones.

[0304] A pharmaceutical composition of the invention is formulated to be compatible with its intended route of administration. Examples of routes of administration include parenteral, e.g., intravenous, intradermal, subcutaneous, oral (e.g., inhalation), transdermal (topical), transmucosal, and rectal administration. Solutions or suspensions used for parenteral, intradermal, or subcutaneous application can include the following components: a sterile diluent such as water for injection, saline solution, fixed oils, polyethylene glycols, glycerine, propylene glycol or other synthetic solvents; antibacterial agents such as benzyl alcohol or methyl parabens; antioxidants such as ascorbic acid or sodium bisulfite; chelating agents such as ethylenediaminetetraacetic acid; buffers such as acetates, citrates or phosphates and agents for the adjustment of tonicity such as sodium chloride or dextrose. pH can be adjusted with acids or bases, such as hydrochloric acid or sodium hydroxide. The parenteral preparation can be enclosed in ampoules, disposable syringes or multiple dose vials made of glass or plastic.

[0305] Pharmaceutical compositions suitable for injectable use include sterile aqueous solutions (where water soluble) or dispersions and sterile powders for the extemporaneous preparation of sterile injectable solutions or dispersions. For intravenous administration, suitable carriers include physiological saline, bacteriostatic water, Cremophor EM™ (BASF, Parsippany, N.J.) or phosphate buffered saline (PBS). In all cases, the composition must be sterile and should be fluid to the extent that easy syringability exists. It must be stable under the conditions of manufacture and storage and must be preserved against the contaminating action of microorganisms such as bacteria and fungi. The carrier can be a solvent or dispersion medium containing, for example, water, ethanol, a pharmaceutically acceptable polyol like glycerol, propylene glycol, liquid polyetheylene glycol, and suitable mixtures thereof. The proper fluidity can be maintained, for example, by the use of a coating such as lecithin, by the maintenance of the required particle size in the case of dispersion and by the use of surfactants. Prevention of the action of microorganisms can be achieved by various antibacterial and antifungal agents, for example, parabens, chlorobutanol, phenol, ascorbic acid, thimerosal, and the like. In many cases, it can be useful to include isotonic agents, for example, sugars, polyalcohols such as mannitol, sorbitol, sodium chloride in the composition. Prolonged absorption of injectable compositions can be brought about by incorporating an agent which delays absorption, for example, aluminum monostearate and gelatin.

[0306] Sterile injectable solutions can be prepared by incorporating the HLDGC modulating compound (e.g., a polypeptide or antibody) in the required amount in an appropriate solvent with one or a combination of ingredients enumerated herein, as required, followed by filtered sterilization. Generally, dispersions are prepared by incorporating the active compound into a sterile vehicle which contains a basic dispersion medium and the required other ingredients from those enumerated herein. In the case of sterile powders for the preparation of sterile injectable solutions, examples of useful preparation methods are vacuum drying and freeze-drying which yields a powder of the active ingredient plus any additional desired ingredient from a previously sterile-filtered solution thereof.

[0307] Oral compositions generally include an inert diluent or an edible carrier. They can be enclosed in gelatin capsules or compressed into tablets. For the purpose of oral therapeutic administration, the active compound can be incorporated with excipients and used in the form of tablets, troches, or capsules. Oral compositions can also be prepared using a fluid carrier for use as a mouthwash, wherein the compound in the fluid carrier is applied orally and swished and expectorated or swallowed.

[0308] Pharmaceutically compatible binding agents, and/or adjuvant materials can be included as part of the composition. The tablets, pills, capsules, troches and the like can contain any of the following ingredients, or compounds of a similar nature: a binder such as microcrystalline cellulose, gum tragacanth or gelatin; an excipient such as starch or lactose, a disintegrating agent such as alginic acid, Primogel, or corn starch; a lubricant such as magnesium stearate or sterotes; a glidant such as colloidal silicon dioxide; a sweetening agent such as sucrose or saccharin; or a flavoring agent such as peppermint, methyl salicylate, or orange flavoring.

[0309] Systemic administration can also be by transmucosal or transdermal means. For transmucosal or transdermal administration, penetrants appropriate to the barrier to be permeated are used in the formulation. Such penetrants are generally known in the art, and include, for example, for transmucosal administration, detergents, bile salts, and fusidic acid derivatives. Transmucosal administration can be accomplished through the use of nasal sprays or suppositories. For transdermal administration, the active compounds are formulated into ointments, salves, gels, or creams as generally known in the art

[0310] In some embodiments, the HLDGC modulating compound can be applied via transdermal delivery systems, which slowly releases the active compound for percutaneous absorption. Permeation enhancers can be used to facilitate transdermal penetration of the active factors in the conditioned media. Transdermal patches are described in for example, U.S. Pat. No. 5,407,713; U.S. Pat. No. 5,352,456; U.S. Pat. No. 5,332,213; U.S. Pat. No. 5,336,168; U.S. Pat. No. 5,290,561; U.S. Pat. No. 5,254,346; U.S. Pat. No. 5,164,189; U.S. Pat. No. 5,163,899; U.S. Pat. No. 5,088,977; U.S. Pat. No. 5,087,240; U.S. Pat. No. 5,008,110; and U.S. Pat. No. 4,921,475.

[0311] Various routes of administration and various sites of cell implantation can be utilized, such as, subcutaneous or intramuscular, in order to introduce the aggregated population of cells into a site of preference. Once implanted in a subject (such as a mouse, rat, or human), the aggregated cells can then stimulate the formation of a hair follicle and the subsequent growth of a hair structure at the site of introduction. In another embodiment, transfected cells (for example, cells expressing a protein encoded by a HLDGC gene (such as CTLA-4, IL-2, IL-21, IL-2RA/CD25, IKZF4, a HLA Region residing gene, PTGER4, PRDX5, STX17, NKG2D, ULBP6, ULBP3, HDAC4, CACNA2D3, IL-13, IL-6, CHCHD3, CSMD1, IFNG, IL-26, KIAA0350 (CLEC16A), SOCS1, ANKRD12, or PTPN2) are implanted in a subject to promote the formation of hair follicles within the subject. In further embodiments, the transfected cells are cells derived from the end bulb of a hair follicle (such as dermal papilla cells or dermal sheath cells). Aggregated cells (for example, cells grown in a hanging drop culture) or transfected cells (for example, cells produced as described herein) maintained for 1 or more passages can be introduced (or implanted) into a subject (such as a rat, mouse, dog, cat, human, and the like).

[0312] “Subcutaneous” administration can refer to administration just beneath the skin (i.e., beneath the dermis). Generally, the subcutaneous tissue is a layer of fat and connective tissue that houses larger blood vessels and nerves. The size of this layer varies throughout the body and from person to person. The interface between the subcutaneous and muscle layers can be encompassed by subcutaneous administration.

[0313] This mode of administration can be feasible where the subcutaneous layer is sufficiently thin so that the factors present in the compositions can migrate or diffuse from the locus of administration and contact the hair follicle cells responsible for hair formation. Thus, where intradermal administration is utilized, the bolus of composition administered is localized proximate to the subcutaneous layer.

[0314] Administration of the cell aggregates (such as DP or DS aggregates) is not restricted to a single route, but may encompass administration by multiple routes. For instance, exemplary administrations by multiple routes include, among others, a combination of intradermal and intramuscular administration, or intradermal and subcutaneous administration. Multiple administrations may be sequential or concurrent. Other modes of application by multiple routes will be apparent to the skilled artisan.

[0315] In other embodiments, this implantation method will be a one-time treatment for some subjects. In further embodiments of the invention, multiple cell therapy implantations will be required. In some embodiments, the cells used for implantation will generally be subject-specific genetically engineered cells. In another embodiment, cells obtained from a different species or another individual of the same species can be used. Thus, using such cells may require administering an immunosuppressant to prevent rejection of the implanted cells. Such methods have also been described in United States Patent Application Publication 2004/0057937 and PCT application publication WO 2001/32840, and are hereby incorporated by reference.

[0316] These methods described herein are by no means all-inclusive, and further methods to suit the specific application is understood by the ordinary skilled artisan. Moreover, the effective amount of the compositions can be further approximated through analogy to compounds known to exert the desired effect.

[0317] Unless otherwise defined, all technical and scientific terms used herein have the same meaning as commonly understood by one of ordinary skill in the art to which this invention belongs. Exemplary methods and materials are described below, although methods and materials similar or equivalent to those described herein can also be used in the practice or testing of the present invention.

[0318] All publications and other references mentioned herein are incorporated by reference in their entirety, as if each individual publication or reference were specifically and individually indicated to be incorporated by reference. Publications and references cited herein are not admitted to be prior art.

### EXAMPLES

[0319] Examples are provided below to facilitate a more complete understanding of the invention. The following examples illustrate the exemplary modes of making and practicing the invention. However, the scope of the invention is not limited to specific embodiments disclosed in these Examples, which are for purposes of illustration only, since alternative methods can be utilized to obtain similar results.

### Example 1

### Genomewide Association Study in Alopecia Areata Implicates Both Innate and Adaptive Immunity

[0320] We undertook a genome-wide association study (GWAS) in an initial discovery sample of 250 unrelated cases and 1049 controls, and replicated our findings in an independent sample of 804 cases and 2229 controls.

[0321] Joint analysis of the datasets identified 141 SNPs that are significantly associated with AA (p≦5×10⁻⁷). We identified association with several key components of Treg activation and proliferation, CTLA4, IL-2/IL-21, IL-2RA/CD25, and Eos (IKZF4), as well as the HLA class II region. We also found evidence for genes expressed in the hair follicle itself (PTGER4, PRDX5, STX17). Unexpectedly, a region of strong association resides within the ULBP gene cluster on chromosome 6q25.1, encoding activating ligands of the natural killer cell receptor, NKG2D, which have never before been implicated in an autoimmune disease. We discovered that expression of ULBP3 in lesional scalp from AA patients is markedly upregulated in the hair follicle dermal sheath during active disease.

[0322] This study provides evidence for involvement of both innate and acquired immunity in the pathogenesis of AA. Taken together, we have defined the genetic underpinnings of AA for the first time, placing AA within the context of shared pathways among autoimmune diseases, and implicating a new disease mechanism, the upregulation of ULBP ligands, in triggering autoimmunity.

[0323] The concept of an early ‘danger signal’ emanating from the hair follicle can be a key initial event in triggering the cascade of AA immunopathogenesis.^{N4} Evidence supporting a genetic basis for AA stems from multiple lines of evidence, including the observed heritability in first degree relatives,^{N5,N6} twin studies,^{N7} and most recently, from the results of our family-based linkage studies.^{N8} A number of candidate-gene association studies have been performed, mainly by selecting genes implicated in other autoimmune diseases, (reviewed in^{N3}), however, these studies were both underpowered in terms of sample size and by definition, biased by choices of candidate genes. Specifically, associations have been reported for HLA-residing genes (HLA-DQB1, HLA-DRB1, HLA-B, HLA-C, NOTCH4, MICA), as well as genes outside of the HLA (PTPN22, AIRE).

[0324] To determine the genetic basis of AA using an unbiased approach, in this study we performed a GWAS 1055 AA cases and 3278 controls, and identified 141 SNPs that exceeded genome-wide significance (p≦5×10⁻⁷). Unexpectedly, we found evidence for genes involved in both the innate and adaptive immune responses, as well as upregulation of ‘danger signals’ in affected hair follicles that contribute to disease pathogenesis.

[0325] Methods

[0326] Patient Population.

[0327] Cases were ascertained through the National Alopecia Areata Registry (NAAR)^{N9} with approval from institutional review boards, which recruits patients in the US primarily through five clinical sites. Three sets of previously published control datasets were used for comparison of allele frequencies.^{N10-N12} All samples were genotyped on the Illumina HumanHap 550v2 or 610 chip and were confirmed to be of European ancestry by principal component analysis with ancestry informative markers. Stringent quality control measures were used to remove samples and markers that did not exceed pre-defined thresholds. Tests of association were run with and without measures to control for residual population stratification. Tissue specimens and RNA from human scalp biopsies were obtained with approval from institutional review boards. All experiments were performed according to the Helsinki guidelines.

[0328] Genotyping.

[0329] Quality control was performed with Helix Tree software (Golden Helix) or PLINK (http://pngu.mgh.harvard.edu/purcell/plink/)^{N33}. SNPs that were missing more than 5% data, did not follow Hardy Weinberg Equilibrium in controls (p<0.0001), or were not present in both Illumina 550 Kv2 and Illumina 610K were removed, leaving 463, 308 SNPs for analysis. Next, 19 samples with more than 10% missing genotype data were removed. In addition, 3 case and 8 control samples that shared more than 25% inferred identity by descent were removed. Principal component analysis (PCA) using a subset of 3568 ancestry informative markers^{N34} (AIMs) identified 5 cases and 12 controls as ethnic outliers and removed prior to analysis. Samples more than 6 standard deviations units from 5 components were excluded from subsequent analysis. Visual inspection of a plot of the first two eigenvectors identified 141 controls for which matched cases did not exist. These were excluded from further analysis.

[0330] Statistical Analysis.

[0331] Reported association values were obtained with logistic regression assuming an additive genetic model and included a covariate to adjust for any residual population stratification. Statistics unadjusted for residual population stratification were also examined, as well as p-values obtained with the false discovery rate method and were found to be equivalent to reported values. LD was quantitated and evaluated with Haploview^{N35}. SAS was used to perform stratified analysis and logistic modeling to determine if SNPs shared a common haplotype. If the adjusted OR differed from the crude estimate by more than 10%, then a common haplotype was inferred. Assessment of individual genetic liability was performed in Excel (Microsoft). A single marker was chosen as a proxy for each of the independent risk haplotypes. Alleles for the 18 proxy markers were coded 1 if associated with increased risk and 0 otherwise, and then summed for each individual. A two-tailed student t-test was used to determine the significance of the difference in the distribution of risk alleles between cases and controls, under an assumption of unequal variance. The population attributable fraction (AFₚ) for each SNP was calculated as

$${AF}_{p} = \frac{PF ( OR - 1 )}{1 + PF ( OR - 1 )}$$

where ORᵢ indexes the estimate associated with heterozygous and homozygous carriage of risk-increasing genotypes, and PFᵢ denotes the genotype frequencies in the controls. LD-based imputation using the Markov Chain Haplotyping algorithm (MACH 1.0.16, http://www.sph.umich.edu/csg/abecasis/mach/tour/imputation.html) was used to carry out genome-wide maximum likelihood genotype imputation. Weighted logistic regression test on binary trait using mach2dat was used to assess the quality of the imputation, again followed by logistic regression association test assuming an additive model with top 10 principle components as covariates to adjust for any residual population stratification using PLINK.

[0332] Tissue specimens.

[0333] Human skin scalp biopsies were obtained from 19 AA patients (age range 28-77 years) from a lesional area, while control samples were either frontotemporal human skin scalp biopsies taken from seven healthy women undergoing facelift surgery (age range 35-67 years), or occipital region of human skin scalp biopsies from two healthy men. All experiments were performed according to the Helsinki guidelines. Specimens were embedded directly in OCT compound, or fixed in 10% formalin and embedded in paraffin blocks and cut into 5 μm-thick sections.

[0334] Immunohistology.

[0335] In order to detect ULBP3 protein expression in situ a labeled-streptavidin-biotin-method (LSAB)-based staining was performed. Briefly, paraffin sections were deparaffinised and immunostained after antigen retrieval with citrate buffer, and appropriate blocking steps against endogenous peroxidase, using the rabbit antihuman ULBP3 antibody (1:250 in antibody diluent, DCS, Hamburg, Germany) overnight at 4° C. All incubation steps were interspersed by washing with Tris-buffered saline (TBS, 0.05 M, pH 7.6; 3×5 min). This was followed by staining with a biotinylated PolyLink secondary antibody (DCS) for 20 min at RT, and developed using the peroxidase-streptavidin-conjugate (DCS, 20 min at RT) method. Finally, the slides were labelled with 3-amino-9-ethylcarbazole (AEC) substrate (Vector Elite ABC Kit, Vector Laboratories, Burlingame, USA) and counterstained with haematoxylin.

[0336] Quantitative Immunohistomorphometry.

[0337] The number of ULBP3 positive cells was evaluated in 3 microscopic fields at 200 times magnification in the dermis, and in the hair follicle (HF) connective tissue sheath (CTS) and parafollicular around each hair bulb of AA and control skin. All data were analyzed by Mann-Whitney-Test for unpaired samples (expressed as mean±SEM; p values of <0.05 regarded as significant).

[0338] Indirect Immunofluorescence (IIF).

[0339] IIF on fresh frozen sections of human scalp skin was performed as described previously.^{N36} The primary antibodies used were mouse monoclonal anti-ULBP3 (clone 2F9; diluted 1:50; Santa Cruz Biotechnology), rabbit polyclonal anti-CD3 (1:50; DAKO), mouse monoclonal anti-CD8 (clone C8/144B; prediluted; Abcam), rabbit polyclonal anti-CD8 (1:200; Abcam), mouse monoclonal anti-NKG2D (clone 1D11; 1:100; Abcam), rabbit polyclonal anti-PTGER4 (1:25; Sigma), rabbit polyclonal anti-STX17 (1:500; Sigma), rabbit polyclonal anti-PRDX5 (1:500; Abnova), guinea pig polyclonal anti-K74 (1:2,000), and guinea pig polyclonal anti-K31 (1:8,000). The anti-K74 and anti-K31 antibodies were kindly provided by Dr. Lutz Langbein in German Cancer Research Center.

[0340] RT-PCR Analysis.

[0341] Total RNA was isolated from scalp skin and whole blood of a healthy control individual using the RNeasy® Minikit according to the manufacturer's instructions (Qiagen). 2 μg of total RNA was reverse-transcribed using oligo-dT primers and SuperScript™ III (Invitrogen). Using the first-strand cDNAs as templates, PCR was performed using Platinum® PCR SuperMix (Invitrogen) and primer pairs shown in Table 9. The amplification conditions were 94° C. for 2 min, followed by 35 cycles of 94° C. for 30 sec, 60° C. for 30 sec, and 72° C. for 50 sec, with a final extension at 72° C. for 7 min. PCR products were run on 2.0% agarose gels. Real-time PCR was performed on an ABI 7300 (Applied Biosystems). PCR reactions were performed using ABI SYBR Green PCR Master Mix, 300 nM primers, 50 ng cDNA at the following consecutive steps: (a) 50° C. for 2 min, (b) 95° C. for 10 min, (c) 40 cycles of 95° C. for 15 sec and 60° C. for 1 min. The samples were run in triplicate and normalized to an internal control (GAPDH) using the accompanying software.

TABLE 9
Primer Sequences.

| | | SEQ | | SEQ | product |
|---|---|---|---|---|---|
| | forward primer | ID | reverse primer | ID | size |
| gene | (5′ to 3′) | NO: | (5′ to 3′) | NO: | (bp) |
| ULBP3 | GATTTCACACCCA | 25 | CTATGGCTTTGG | 26 | 337 |
| | GTGGACC | | GTTGAGCTAA | | |
| STX17 | TCCATGACTGTTG | 27 | CTCCTGCTGAGA | 28 | 192 |
| | GTGGAGCA | | ATTCACTAGG | | |
| PRDX5 | TCGCTGGTGTCCA | 29 | TGGCCAACATTCC | 30 | 230 |
| | TCTTTGG | | AATTGCAG | | |
| PTGER4 | CGAGATCCAGATG | 31 | GGTCTAGGATGG | 32 | 179 |
| | GTCATCTTAC | | GGTTCACA | | |
| IKZF4 | CTCACCGGCAAGG | 33 | GATGAGTCCCCG | 34 | 133 |
| | GAAGGAT | | CTACTTTCA | | |
| IL2RA | TGGCAGCGGAGAC | 35 | ACGCAGGCAAGC | 36 | 163 |
| | AGAGGAA | | ACAACGGA | | |
| KRT15 | GGGTTTTGGTGGT | 37 | TCGTGGTTCTTCT | 38 | 474 |
| | GGCTTTG | | TCAGGTAGGC | | |
| GAPDH | TCACCAGGGCTGC | 39 | GGGTGGAATCAT | 40 | 105 |
| | TTTTAACTC | | ATTGGAACATG | | |

TABLE 10
Human NKG2D NM_007360

| SEQ | | SEQ | |
|---|---|---|---|
| ID | | ID | |
| NO. | siRNA (19 bp) | NO. | Reverse complement |
| 41 | ACTTTCAATTCTAGATCAG | 42 | CTGATCTAGAATTGAAAGT |
| 43 | CTTTCAATTCTAGATCAGG | 44 | CCTGATCTAGAATTGAAAG |
| 45 | TTTCAATTCTAGATCAGGA | 46 | TCCTGATCTAGAATTGAAA |
| 47 | TTCAATTCTAGATCAGGAA | 48 | TTCCTGATCTAGAATTGAA |
| 49 | TCAATTCTAGATCAGGAAC | 50 | GTTCCTGATCTAGAATTGA |
| 51 | CAATTCTAGATCAGGAACT | 52 | AGTTCCTGATCTAGAATTG |
| 53 | AATTCTAGATCAGGAACTG | 54 | CAGTTCCTGATCTAGAATT |
| 55 | ATTCTAGATCAGGAACTGA | 56 | TCAGTTCCTGATCTAGAAT |
| 57 | TTCTAGATCAGGAACTGAG | 58 | CTCAGTTCCTGATCTAGAA |
| 59 | TCTAGATCAGGAACTGAGG | 60 | CCTCAGTTCCTGATCTAGA |
| 61 | CTAGATCAGGAACTGAGGA | 62 | TCCTCAGTTCCTGATCTAG |
| 63 | TAGATCAGGAACTGAGGAC | 64 | GTCCTCAGTTCCTGATCTA |
| 65 | AGATCAGGAACTGAGGACA | 66 | TGTCCTCAGTTCCTGATCT |
| 67 | GATCAGGAACTGAGGACAT | 68 | ATGTCCTCAGTTCCTGATC |
| 69 | ATCAGGAACTGAGGACATA | 70 | TATGTCCTCAGTTCCTGAT |
| 71 | TCAGGAACTGAGGACATAT | 72 | ATATGTCCTCAGTTCCTGA |
| 73 | CAGGAACTGAGGACATATC | 74 | GATATGTCCTCAGTTCCTG |
| 75 | AGGAACTGAGGACATATCT | 76 | AGATATGTCCTCAGTTCCT |
| 77 | GGAACTGAGGACATATCTA | 78 | TAGATATGTCCTCAGTTCC |
| 79 | GAACTGAGGACATATCTAA | 80 | TTAGATATGTCCTCAGTTC |
| 81 | AACTGAGGACATATCTAAA | 82 | TTTAGATATGTCCTCAGTT |
| 83 | ACTGAGGACATATCTAAAT | 84 | ATTTAGATATGTCCTCAGT |
| 85 | CTGAGGACATATCTAAATT | 86 | AATTTAGATATGTCCTCAG |
| 87 | TGAGGACATATCTAAATTT | 88 | AAATTTAGATATGTCCTCA |
| 89 | GAGGACATATCTAAATTTT | 90 | AAAATTTAGATATGTCCTC |
| 91 | AGGACATATCTAAATTTTC | 92 | GAAAATTTAGATATGTCCT |
| 93 | GGACATATCTAAATTTTCT | 94 | AGAAAATTTAGATATGTCC |
| 95 | GACATATCTAAATTTTCTA | 96 | TAGAAAATTTAGATATGTC |
| 97 | ACATATCTAAATTTTCTAG | 98 | CTAGAAAATTTAGATATGT |
| 99 | CATATCTAAATTTTCTAGT | 100 | ACTAGAAAATTTAGATATG |
| 101 | ATATCTAAATTTTCTAGTT | 102 | AACTAGAAAATTTAGATAT |
| 103 | TATCTAAATTTTCTAGTTT | 104 | AAACTAGAAAATTTAGATA |
| 105 | ATCTAAATTTTCTAGTTTT | 106 | AAAACTAGAAAATTTAGAT |
| 107 | TCTAAATTTTCTAGTTTTA | 108 | TAAAACTAGAAAATTTAGA |
| 109 | CTAAATTTTCTAGTTTTAT | 110 | ATAAAACTAGAAAATTTAG |
| 111 | TAAATTTTCTAGTTTTATA | 112 | TATAAAACTAGAAAATTTA |
| 113 | AAATTTTCTAGTTTTATAG | 114 | CTATAAAACTAGAAAATTT |
| 115 | AATTTTCTAGTTTTATAGA | 116 | TCTATAAAACTAGAAAATT |
| 117 | ATTTTCTAGTTTTATAGAA | 118 | TTCTATAAAACTAGAAAAT |
| 119 | TTTTCTAGTTTTATAGAAG | 120 | CTTCTATAAAACTAGAAAA |
| 121 | TTTCTAGTTTTATAGAAGG | 122 | CCTTCTATAAAACTAGAAA |
| 123 | TTCTAGTTTTATAGAAGGC | 124 | GCCTTCTATAAAACTAGAA |
| 125 | TCTAGTTTTATAGAAGGCT | 126 | AGCCTTCTATAAAACTAGA |
| 127 | CTAGTTTTATAGAAGGCTT | 128 | AAGCCTTCTATAAAACTAG |
| 129 | TAGTTTTATAGAAGGCTTT | 130 | AAAGCCTTCTATAAAACTA |
| 131 | AGTTTTATAGAAGGCTTTT | 132 | AAAAGCCTTCTATAAAACT |
| 133 | GTTTTATAGAAGGCTTTTA | 134 | TAAAAGCCTTCTATAAAAC |
| 135 | TTTTATAGAAGGCTTTTAT | 136 | ATAAAAGCCTTCTATAAAA |
| 137 | TTTATAGAAGGCTTTTATC | 138 | GATAAAAGCCTTCTATAAA |
| 139 | TTATAGAAGGCTTTTATCC | 140 | GGATAAAAGCCTTCTATAA |
| 141 | TATAGAAGGCTTTTATCCA | 142 | TGGATAAAAGCCTTCTATA |
| 143 | ATAGAAGGCTTTTATCCAC | 144 | GTGGATAAAAGCCTTCTAT |
| 145 | TAGAAGGCTTTTATCCACA | 146 | TGTGGATAAAAGCCTTCTA |
| 147 | AGAAGGCTTTTATCCACAA | 148 | TTGTGGATAAAAGCCTTCT |
| 149 | GAAGGCTTTTATCCACAAG | 150 | CTTGTGGATAAAAGCCTTC |
| 151 | AAGGCTTTTATCCACAAGA | 152 | TCTTGTGGATAAAAGCCTT |
| 153 | AGGCTTTTATCCACAAGAA | 154 | TTCTTGTGGATAAAAGCCT |
| 155 | GGCTTTTATCCACAAGAAT | 156 | ATTCTTGTGGATAAAAGCC |
| 157 | GCTTTTATCCACAAGAATC | 158 | GATTCTTGTGGATAAAAGC |
| 159 | CTTTTATCCACAAGAATCA | 160 | TGATTCTTGTGGATAAAAG |
| 161 | TTTTATCCACAAGAATCAA | 162 | TTGATTCTIGTGGATAAAA |
| 163 | TTTATCCACAAGAATCAAG | 164 | CTTGATTCTTGTGGATAAA |
| 165 | TTATCCACAAGAATCAAGA | 166 | TCTTGATTCTTGTGGATAA |
| 167 | TATCCACAAGAATCAAGAT | 168 | ATCTTGATTCTTGTGGATA |
| 169 | ATCCACAAGAATCAAGATC | 170 | GATCTTGATTCTTGTGGAT |
| 171 | TCCACAAGAATCAAGATCT | 172 | AGATCTTGATTCTTGTGGA |
| 173 | CCACAAGAATCAAGATCTT | 174 | AAGATCTTGATTCTTGTGG |
| 175 | CACAAGAATCAAGATCTTC | 176 | GAAGATCTTGATTCTTGTG |
| 177 | ACAAGAATCAAGATCTTCC | 178 | GGAAGATCTTGATTCTTGT |
| 179 | CAAGAATCAAGATCTTCCC | 180 | GGGAAGATCTTGATTCTTG |
| 181 | AAGAATCAAGATCTTCCCT | 182 | AGGGAAGATCTTGATTCTT |
| 183 | AGAATCAAGATCTTCCCTC | 184 | GAGGGAAGATCTTGATTCT |
| 185 | GAATCAAGATCTTCCCTCT | 186 | AGAGGGAAGATCTTGATTC |
| 187 | AATCAAGATCTTCCCTCTC | 188 | GAGAGGGAAGATCTTGATT |
| 189 | ATCAAGATCTTCCCTCTCT | 190 | AGAGAGGGAAGATCTTGAT |
| 191 | TCAAGATCTTCCCTCTCTG | 192 | CAGAGAGGGAAGATCTTGA |
| 193 | CAAGATCTTCCCTCTCTGA | 194 | TCAGAGAGGGAAGATCTTG |
| 195 | AAGATCTTCCCTCTCTGAG | 196 | CTCAGAGAGGGAAGATCTT |
| 197 | AGATCTTCCCTCTCTGAGC | 198 | GCTCAGAGAGGGAAGATCT |
| 199 | GATCTTCCCTCTCTGAGCA | 200 | TGCTCAGAGAGGGAAGATC |
| 201 | ATCTTCCCTCTCTGAGCAG | 202 | CTGCTCAGAGAGGGAAGAT |
| 203 | TCTTCCCTCTCTGAGCAGG | 204 | CCTGCTCAGAGAGGGAAGA |
| 205 | CTTCCCTCTCTGAGCAGGA | 206 | TCCTGCTCAGAGAGGGAAG |
| 207 | TTCCCTCTCTGAGCAGGAA | 208 | TTCCTGCTCAGAGAGGGAA |
| 209 | TCCCTCTCTGAGCAGGAAT | 210 | ATTCCTGCTCAGAGAGGGA |
| 211 | CCCTCTCTGAGCAGGAATC | 212 | GATTCCTGCTCAGAGAGGG |
| 213 | CCTCTCTGAGCAGGAATCC | 214 | GGATTCCTGCTCAGAGAGG |
| 215 | CTCTCTGAGCAGGAATCCT | 216 | AGGATTCCTGCTCAGAGAG |
| 217 | TCTCTGAGCAGGAATCCTT | 218 | AAGGATTCCTGCTCAGAGA |
| 219 | CTCTGAGCAGGAATCCTTT | 220 | AAAGGATTCCTGCTCAGAG |
| 221 | TCTGAGCAGGAATCCTTTG | 222 | CAAAGGATTCCTGCTCAGA |
| 223 | CTGAGCAGGAATCCTTTGT | 224 | ACAAAGGATTCCTGCTCAG |
| 225 | TGAGCAGGAATCCTTTGTG | 226 | CACAAAGGATTCCTGCTCA |
| 227 | GAGCAGGAATCCTTTGTGC | 228 | GCACAAAGGATTCCTGCTC |
| 229 | AGCAGGAATCCTTTGTGCA | 230 | TGCACAAAGGATTCCTGCT |
| 231 | GCAGGAATCCTTTGTGCAT | 232 | ATGCACAAAGGATTCCTGC |
| 233 | CAGGAATCCTTTGTGCATT | 234 | AATGCACAAAGGATTCCTG |
| 235 | AGGAATCCTTTGTGCATTG | 236 | CAATGCACAAAGGATTCCT |
| 237 | GGAATCCTTTGTGCATTGA | 238 | TCAATGCACAAAGGATTCC |
| 239 | GAATCCTTTGTGCATTGAA | 240 | TTCAATGCACAAAGGATTC |
| 241 | AATCCTTTGTGCATTGAAG | 242 | CTTCAATGCACAAAGGATT |
| 243 | ATCCTTTGTGCATTGAAGA | 244 | TCTTCAATGCACAAAGGAT |
| 245 | TCCTTTGTGCATTGAAGAC | 246 | GTCTTCAATGCACAAAGGA |
| 247 | CCTTTGTGCATTGAAGACT | 248 | AGTCTTCAATGCACAAAGG |
| 249 | CTTTGTGCATTGAAGACTT | 250 | AAGTCTTCAATGCACAAAG |
| 251 | TTTGTGCATTGAAGACTTT | 252 | AAAGTCTTCAATGCACAAA |
| 253 | TTGTGCATTGAAGACTTTA | 254 | TAAAGTCTTCAATGCACAA |
| 255 | TGTGCATTGAAGACTTTAG | 256 | CTAAAGTCTTCAATGCACA |
| 257 | GTGCATTGAAGACTTTAGA | 258 | TCTAAAGTCTTCAATGCAC |
| 259 | TGCATTGAAGACTTTAGAT | 260 | ATCTAAAGTCTTCAATGCA |
| 261 | GCATTGAAGACTTTAGATT | 262 | AATCTAAAGTCTTCAATGC |
| 263 | CATTGAAGACTTTAGATTC | 264 | GAATCTAAAGTCTTCAATG |
| 265 | ATTGAAGACTTTAGATTCC | 266 | GGAATCTAAAGTCTTCAAT |
| 267 | TTGAAGACTTTAGATTCCT | 268 | AGGAATCTAAAGTCTTCAA |
| 269 | TGAAGACTTTAGATTCCTC | 270 | GAGGAATCTAAAGTCTTCA |
| 271 | GAAGACTTTAGATTCCTCT | 272 | AGAGGAATCTAAAGTCTTC |
| 273 | AAGACTTTAGATTCCTCTC | 274 | GAGAGGAATCTAAAGTCTT |
| 275 | AGACTTTAGATTCCTCTCT | 276 | AGAGAGGAATCTAAAGTCT |
| 277 | GACTTTAGATTCCTCTCTG | 278 | CAGAGAGGAATCTAAAGTC |
| 279 | ACTTTAGATTCCTCTCTGC | 280 | GCAGAGAGGAATCTAAAGT |
| 281 | CTTTAGATTCCTCTCTGCG | 282 | CGCAGAGAGGAATCTAAAG |
| 283 | TTTAGATTCCTCTCTGCGG | 284 | CCGCAGAGAGGAATCTAAA |
| 285 | TTAGATTCCTCTCTGCGGT | 286 | ACCGCAGAGAGGAATCTAA |
| 287 | TAGATTCCTCTCTGCGGTA | 288 | TACCGCAGAGAGGAATCTA |
| 289 | AGATTCCTCTCTGCGGTAG | 290 | CTACCGCAGAGAGGAATCT |
| 291 | GATTCCTCTCTGCGGTAGA | 292 | TCTACCGCAGAGAGGAATC |
| 293 | ATTCCTCTCTGCGGTAGAC | 294 | GTCTACCGCAGAGAGGAAT |
| 295 | TTCCTCTCTGCGGTAGACG | 296 | CGTCTACCGCAGAGAGGAA |
| 297 | TCCTCTCTGCGGTAGACGT | 298 | ACGTCTACCGCAGAGAGGA |
| 299 | CCTCTCTGCGGTAGACGTG | 300 | CACGTCTACCGCAGAGAGG |
| 301 | CTCTCTGCGGTAGACGTGC | 302 | GCACGTCTACCGCAGAGAG |
| 303 | TCTCTGCGGTAGACGTGCA | 304 | TGCACGTCTACCGCAGAGA |
| 305 | CTCTGCGGTAGACGTGCAC | 306 | GTGCACGTCTACCGCAGAG |
| 307 | TCTGCGGTAGACGTGCACT | 308 | AGTGCACGTCTACCGCAGA |
| 309 | CTGCGGTAGACGTGCACTT | 310 | AAGTGCACGTCTACCGCAG |
| 311 | TGCGGTAGACGTGCACTTA | 312 | TAAGTGCACGTCTACCGCA |
| 313 | GCGGTAGACGTGCACTTAT | 314 | ATAAGTGCACGTCTACCGC |
| 315 | CGGTAGACGTGCACTTATA | 316 | TATAAGTGCACGTCTACCG |
| 317 | GGTAGACGTGCACTTATAA | 318 | TTATAAGTGCACGTCTACC |
| 319 | GTAGACGTGCACTTATAAG | 320 | CTTATAAGTGCACGTCTAC |
| 321 | TAGACGTGCACTTATAAGT | 322 | ACTTATAAGTGCACGTCTA |
| 323 | AGACGTGCACTTATAAGTA | 324 | TACTTATAAGTGCACGTCT |
| 325 | GACGTGCACTTATAAGTAT | 326 | ATACTTATAAGTGCACGTC |
| 327 | ACGTGCACTTATAAGTATT | 328 | AATACTTATAAGTGCACGT |
| 329 | CGTGCACTTATAAGTATTT | 330 | AAATACTTATAAGTGCACG |
| 331 | GTGCACTTATAAGTATTTG | 332 | CAAATACTTATAAGTGCAC |
| 333 | TGCACTTATAAGTATTTGA | 334 | TCAAATACTTATAAGTGCA |
| 335 | GCACTTATAAGTATTTGAT | 336 | ATCAAATACTTATAAGTGC |
| 337 | CACTTATAAGTATTTGATG | 338 | CATCAAATACTTATAAGTG |
| 339 | ACTTATAAGTATTTGATGG | 340 | CCATCAAATACTTATAAGT |
| 341 | CTTATAAGTATTTGATGGG | 342 | CCCATCAAATACTTATAAG |
| 343 | TTATAAGTATTTGATGGGG | 344 | CCCCATCAAATACTTATAA |
| 345 | TATAAGTATTTGATGGGGT | 346 | ACCCCATCAAATACTTATA |
| 347 | ATAAGTATTTGATGGGGTG | 348 | CACCCCATCAAATACTTAT |
| 349 | TAAGTATTTGATGGGGTGG | 350 | CCACCCCATCAAATACTTA |
| 351 | AAGTATTTGATGGGGTGGA | 352 | TCCACCCCATCAAATACTT |
| 353 | AGTATTTGATGGGGTGGAT | 354 | ATCCACCCCATCAAATACT |
| 355 | GTATTTGATGGGGTGGATT | 356 | AATCCACCCCATCAAATAC |
| 357 | TATTTGATGGGGTGGATTC | 358 | GAATCCACCCCATCAAATA |
| 359 | ATTTGATGGGGTGGATTCG | 360 | CGAATCCACCCCATCAAAT |
| 361 | TTTGATGGGGTGGATTCGT | 362 | ACGAATCCACCCCATCAAA |
| 363 | TTGATGGGGTGGATTCGTG | 364 | CACGAATCCACCCCATCAA |
| 365 | TGATGGGGTGGATTCGTGG | 366 | CCACGAATCCACCCCATCA |
| 367 | GATGGGGTGGATTCGTGGT | 368 | ACCACGAATCCACCCCATC |
| 369 | ATGGGGTGGATTCGTGGTC | 370 | GACCACGAATCCACCCCAT |
| 371 | TGGGGTGGATTCGTGGTCG | 372 | CGACCACGAATCCACCCCA |
| 373 | GGGGTGGATTCGTGGTCGG | 374 | CCGACCACGAATCCACCCC |
| 375 | GGGTGGATTCGTGGTCGGA | 376 | TCCGACCACGAATCCACCC |
| 377 | GGTGGATTCGTGGTCGGAG | 378 | CTCCGACCACGAATCCACC |
| 379 | GTGGATTCGTGGTCGGAGG | 380 | CCTCCGACCACGAATCCAC |
| 381 | TGGATTCGTGGTCGGAGGT | 382 | ACCTCCGACCACGAATCCA |
| 383 | GGATTCGTGGTCGGAGGTC | 384 | GACCTCCGACCACGAATCC |
| 385 | GATTCGTGGTCGGAGGTCT | 386 | AGACCTCCGACCACGAATC |
| 387 | ATTCGTGGTCGGAGGTCTC | 388 | GAGACCTCCGACCACGAAT |
| 389 | TTCGTGGTCGGAGGTCTCG | 390 | CGAGACCTCCGACCACGAA |
| 391 | TCGTGGTCGGAGGTCTCGA | 392 | TCGAGACCTCCGACCACGA |
| 393 | CGTGGTCGGAGGTCTCGAC | 394 | GTCGAGACCTCCGACCACG |
| 395 | GTGGTCGGAGGTCTCGACA | 396 | TGTCGAGACCTCCGACCAC |
| 397 | TGGTCGGAGGTCTCGACAC | 398 | GTGTCGAGACCTCCGACCA |
| 399 | GGTCGGAGGTCTCGACACA | 400 | TGTGTCGAGACCTCCGACC |
| 401 | GTCGGAGGTCTCGACACAG | 402 | CTGTGTCGAGACCTCCGAC |
| 403 | TCGGAGGTCTCGACACAGC | 404 | GCTGTGTCGAGACCTCCGA |
| 405 | CGGAGGTCTCGACACAGCT | 406 | AGCTGTGTCGAGACCTCCG |
| 407 | GGAGGTCTCGACACAGCTG | 408 | CAGCTGTGTCGAGACCTCC |
| 409 | GAGGTCTCGACACAGCTGG | 410 | CCAGCTGTGTCGAGACCTC |
| 411 | AGGTCTCGACACAGCTGGG | 412 | CCCAGCTGTGTCGAGACCT |
| 413 | GGTCTCGACACAGCTGGGA | 414 | TCCCAGCTGTGTCGAGACC |
| 415 | GTCTCGACACAGCTGGGAG | 416 | CTCCCAGCTGTGTCGAGAC |
| 417 | TCTCGACACAGCTGGGAGA | 418 | TCTCCCAGCTGTGTCGAGA |
| 419 | CTCGACACAGCTGGGAGAT | 420 | ATCTCCCAGCTGTGTCGAG |
| 421 | TCGACACAGCTGGGAGATG | 422 | CATCTCCCAGCTGTGTCGA |
| 423 | CGACACAGCTGGGAGATGA | 424 | TCATCTCCCAGCTGTGTCG |
| 425 | GACACAGCTGGGAGATGAG | 426 | CTCATCTCCCAGCTGTGTC |
| 427 | ACACAGCTGGGAGATGAGT | 428 | ACTCATCTCCCAGCTGTGT |
| 429 | CACAGCTGGGAGATGAGTG | 430 | CACTCATCTCCCAGCTGTG |
| 431 | ACAGCTGGGAGATGAGTGA | 432 | TCACTCATCTCCCAGCTGT |
| 433 | CAGCTGGGAGATGAGTGAA | 434 | TTCACTCATCTCCCAGCTG |
| 435 | AGCTGGGAGATGAGTGAAT | 436 | ATTCACTCATCTCCCAGCT |
| 437 | GCTGGGAGATGAGTGAATT | 438 | AATTCACTCATCTCCCAGC |
| 439 | CTGGGAGATGAGTGAATTT | 440 | AAATTCACTCATCTCCCAG |
| 441 | TGGGAGATGAGTGAATTTC | 442 | GAAATTCACTCATCTCCCA |
| 443 | GGGAGATGAGTGAATTTCA | 444 | TGAAATTCACTCATCTCCC |
| 445 | GGAGATGAGTGAATTTCAT | 446 | ATGAAATTCACTCATCTCC |
| 447 | GAGATGAGTGAATTTCATA | 448 | TATGAAATTCACTCATCTC |
| 449 | AGATGAGTGAATTTCATAA | 450 | TTATGAAATTCACTCATCT |
| 451 | GATGAGTGAATTTCATAAT | 452 | ATTATGAAATTCACTCATC |
| 453 | ATGAGTGAATTTCATAATT | 454 | AATTATGAAATTCACTCAT |
| 455 | TGAGTGAATTTCATAATTA | 456 | TAATTATGAAATTCACTCA |
| 457 | GAGTGAATTTCATAATTAT | 458 | ATAATTATGAAATTCACTC |
| 459 | AGTGAATTTCATAATTATA | 460 | TATAATTATGAAATTCACT |
| 461 | GTGAATTTCATAATTATAA | 462 | TTATAATTATGAAATTCAC |
| 463 | TGAATTTCATAATTATAAC | 464 | GTTATAATTATGAAATTCA |
| 465 | GAATTTCATAATTATAACT | 466. | AGTTATAATTATGAAATTC |
| 467 | AATTTCATAATTATAACTT | 468 | AAGTTATAATTATGAAATT |
| 469 | ATTTCATAATTATAACTTG | 470 | CAAGTTATAATTATGAAAT |
| 471 | TTTCATAATTATAACTTGG | 472 | CCAAGTTATAATTATGAAA |
| 473 | TTCATAATTATAACTTGGA | 474 | TCCAAGTTATAATTATGAA |
| 475 | TCATAATTATAACTTGGAT | 476 | ATCCAAGTTATAATTATGA |
| 477 | CATAATTATAACTTGGATC | 478 | GATCCAAGTTATAATTATG |
| 479 | ATAATTATAACTTGGATCT | 480 | AGATCCAAGTTATAATTAT |
| 481 | TAATTATAACTTGGATCTG | 482 | CAGATCCAAGTTATAATTA |
| 483 | AATTATAACTTGGATCTGA | 484 | TCAGATCCAAGTTATAATT |
| 485 | ATTATAACTTGGATCTGAA | 486 | TTCAGATCCAAGTTATAAT |
| 487 | TTATAACTTGGATCTGAAG | 488 | CTTCAGATCCAAGTTATAA |
| 489 | TATAACTTGGATCTGAAGA | 490 | TCTTCAGATCCAAGTTATA |
| 491 | ATAACTTGGATCTGAAGAA | 492 | TTCTTCAGATCCAAGTTAT |
| 493 | TAACTTGGATCTGAAGAAG | 494 | CTTCTTCAGATCCAAGTTA |
| 495 | AACTTGGATCTGAAGAAGA | 496 | TCTTCTTCAGATCCAAGTT |
| 497 | ACTTGGATCTGAAGAAGAG | 498 | CTCTTCTTCAGATCCAAGT |
| 499 | CTTGGATCTGAAGAAGAGT | 500 | ACTCTTCTTCAGATCCAAG |
| 501 | TTGGATCTGAAGAAGAGTG | 502 | CACTCTTCTTCAGATCCAA |
| 503 | TGGATCTGAAGAAGAGTGA | 504 | TCACTCTTCTTCAGATCCA |
| 505 | GGATCTGAAGAAGAGTGAT | 506 | ATCACTCTTCTTCAGATCC |
| 507 | GATCTGAAGAAGAGTGATT | 508 | AATCACTCTTCTTCAGATC |
| 509 | ATCTGAAGAAGAGTGATTT | 510 | AAATCACTCTTCTTCAGAT |
| 511 | TCTGAAGAAGAGTGATTTT | 512 | AAAATCACTCTTCTTCAGA |
| 513 | CTGAAGAAGAGTGATTTTT | 514 | AAAAATCACTCTTCTTCAG |
| 515 | TGAAGAAGAGTGATTTTTC | 516 | GAAAAATCACTCTTCTTCA |
| 517 | GAAGAAGAGTGATTTTTCA | 518 | TGAAAAATCACTCTTCTTC |
| 519 | AAGAAGAGTGATTTTTCAA | 520 | TTGAAAAATCACTCTTCTT |
| 521 | AGAAGAGTGATTTTTCAAC | 522 | GTTGAAAAATCACTCTTCT |
| 523 | GAAGAGTGATTTTTCAACA | 524 | TGTTGAAAAATCACTCTTC |
| 525 | AAGAGTGATTTTTCAACAC | 526 | GTGTTGAAAAATCACTCTT |
| 527 | AGAGTGATTTTTCAACACG | 528 | CGTGTTGAAAAATCACTCT |
| 529 | GAGTGATTTTTCAACACGA | 530 | TCGTGTTGAAAAATCACTC |
| 531 | AGTGATTTTTCAACACGAT | 532 | ATCGTGTTGAAAAATCACT |
| 533 | GTGATTTTTCAACACGATG | 534 | CATCGTGTTGAAAAATCAC |
| 535 | TGATTTTTCAACACGATGG | 536 | CCATCGTGTTGAAAAATCA |
| 537 | GATTTTTCAACACGATGGC | 538 | GCCATCGTGTTGAAAAATC |
| 539 | ATTTTTCAACACGATGGCA | 540 | TGCCATCGTGTTGAAAAAT |
| 541 | TTTTTCAACACGATGGCAA | 542 | TTGCCATCGTGTTGAAAAA |
| 543 | TTTTCAACACGATGGCAAA | 544 | TTTGCCATCGTGTTGAAAA |
| 545 | TTTCAACACGATGGCAAAA | 546 | TTTTGCCATCGTGTTGAAA |
| 547 | TTCAACACGATGGCAAAAG | 548 | CTTTTGCCATCGTGTTGAA |
| 549 | TCAACACGATGGCAAAAGC | 550 | GCTTTTGCCATCGTGTTGA |
| 551 | CAACACGATGGCAAAAGCA | 552 | TGCTTTTGCCATCGTGTTG |
| 553 | AACACGATGGCAAAAGCAA | 554 | TTGCTTTTGCCATCGTGTT |
| 555 | ACACGATGGCAAAAGCAAA | 556 | TTTGCTTTTGCCATCGTGT |
| 557 | CACGATGGCAAAAGCAAAG | 558 | CTTTGCTTTTGCCATCGTG |
| 559 | ACGATGGCAAAAGCAAAGA | 560 | TCTTTGCTTTTGCCATCGT |
| 561 | CGATGGCAAAAGCAAAGAT | 562 | ATCTTTGCTTTTGCCATCG |
| 563 | GATGGCAAAAGCAAAGATG | 564 | CATCTTTGCTTTTGCCATC |
| 565 | ATGGCAAAAGCAAAGATGT | 566 | ACATCTTTGCTTTTGCCAT |
| 567 | TGGCAAAAGCAAAGATGTC | 568 | GACATCTTTGCTTTTGCCA |
| 569 | GGCAAAAGCAAAGATGTCC | 570 | GGACATCTTTGCTTTTGCC |
| 571 | GCAAAAGCAAAGATGTCCA | 572 | TGGACATCTTTGCTTTTGC |
| 573 | CAAAAGCAAAGATGTCCAG | 574 | CTGGACATCTTTGCTTTTG |
| 575 | AAAAGCAAAGATGTCCAGT | 576 | ACTGGACATCTTTGCTTTT |
| 577 | AAAGCAAAGATGTCCAGTA | 578 | TACTGGACATCTTTGCTTT |
| 579 | AAGCAAAGATGTCCAGTAG | 580 | CTACTGGACATCTTTGCTT |
| 581 | AGCAAAGATGTCCAGTAGT | 582 | ACTACTGGACATCTTTGCT |
| 583 | GCAAAGATGTCCAGTAGTC | 584 | GACTACTGGACATCTTTGC |
| 585 | CAAAGATGTCCAGTAGTCA | 586 | TGACTACTGGACATCTTTG |
| 587 | AAAGATGTCCAGTAGTCAA | 588 | TTGACTACTGGACATCTTT |
| 589 | AAGATGTCCAGTAGTCAAA | 590 | TTTGACTACTGGACATCTT |
| 591 | AGATGTCCAGTAGTCAAAA | 592 | TTTTGACTACTGGACATCT |
| 593 | GATGTCCAGTAGTCAAAAG | 594 | CTTTTGACTACTGGACATC |
| 595 | ATGTCCAGTAGTCAAAAGC | 596 | GCTTTTGACTACTGGACAT |
| 597 | TGTCCAGTAGTCAAAAGCA | 598 | TGCTTTTGACTACTGGACA |
| 599 | GTCCAGTAGTCAAAAGCAA | 600 | TTGCTTTTGACTACTGGAC |
| 601 | TCCAGTAGTCAAAAGCAAA | 602 | TTTGCTTTTGACTACTGGA |
| 603 | CCAGTAGTCAAAAGCAAAT | 604 | ATTTGCTTTTGACTACTGG |
| 605 | CAGTAGTCAAAAGCAAATG | 606 | CATTTGCTTTTGACTACTG |
| 607 | AGTAGTCAAAAGCAAATGT | 608 | ACATTTGCTTTTGACTACT |
| 609 | GTAGTCAAAAGCAAATGTA | 610 | TACATTTGCTTTTGACTAC |
| 611 | TAGTCAAAAGCAAATGTAG | 612 | CTACATTTGCTTTTGACTA |
| 613 | AGTCAAAAGCAAATGTAGA | 614 | TCTACATTTGCTTTTGACT |
| 615 | GTCAAAAGCAAATGTAGAG | 616 | CTCTACATTTGCTTTTGAC |
| 617 | TCAAAAGCAAATGTAGAGA | 618 | TCTCTACATTTGCTTTTGA |
| 619 | CAAAAGCAAATGTAGAGAA | 620 | TTCTCTACATTTGCTTTTG |
| 621 | AAAAGCAAATGTAGAGAAA | 622 | TTTCTCTACATTTGCTTTT |
| 623 | AAAGCAAATGTAGAGAAAA | 624 | TTTTCTCTACATTTGCTTT |
| 625 | AAGCAAATGTAGAGAAAAT | 626 | ATTTTCTCTACATTTGCTT |
| 627 | AGCAAATGTAGAGAAAATG | 628 | CATTTTCTCTACATTTGCT |
| 629 | GCAAATGTAGAGAAAATGC | 630 | GCATTTTCTCTACATTTGC |
| 631 | CAAATGTAGAGAAAATGCA | 632 | TGCATTTTCTCTACATTTG |
| 633 | AAATGTAGAGAAAATGCAT | 634 | ATGCATTTTCTCTACATTT |
| 635 | AATGTAGAGAAAATGCATC | 636 | GATGCATTTTCTCTACATT |
| 637 | ATGTAGAGAAAATGCATCT | 638 | AGATGCATTTTCTCTACAT |
| 639 | TGTAGAGAAAATGCATCTC | 640 | GAGATGCATTTTCTCTACA |
| 641 | GTAGAGAAAATGCATCTCC | 642 | GGAGATGCATTTTCTCTAC |
| 643 | TAGAGAAAATGCATCTCCA | 644 | TGGAGATGCATTTTCTCTA |
| 645 | AGAGAAAATGCATCTCCAT | 646 | ATGGAGATGCATTTTCTCT |
| 647 | GAGAAAATGCATCTCCATT | 648 | AATGGAGATGCATTTTCTC |
| 649 | AGAAAATGCATCTCCATTT | 650 | AAATGGAGATGCATTTTCT |
| 651 | GAAAATGCATCTCCATTTT | 652 | AAAATGGAGATGCATTTTC |
| 653 | AAAATGCATCTCCATTTTT | 654 | AAAAATGGAGATGCATTTT |
| 655 | AAATGCATCTCCATTTTTT | 656 | AAAAAATGGAGATGCATTT |
| 657 | AATGCATCTCCATTTTTTT | 658 | AAAAAAATGGAGATGCATT |
| 659 | ATGCATCTCCATTTTTTTT | 660 | AAAAAAAATGGAGATGCAT |
| 661 | TGCATCTCCATTTTTTTTC | 662 | GAAAAAAAATGGAGATGCA |
| 663. | GCATCTCCATTTTTTTTCT | 664 | AGAAAAAAAATGGAGATGC |
| 665 | CATCTCCATTTTTTTTCTG | 666 | CAGAAAAAAAATGGAGATG |
| 667 | ATCTCCATTTTTTTTCTGC | 668 | GCAGAAAAAAAATGGAGAT |
| 669 | TCTCCATTTTTTTTCTGCT | 670 | AGCAGAAAAAAAATGGAGA |
| 671 | CTCCATTTTTTTTCTGCTG | 672 | CAGCAGAAAAAAAATGGAG |
| 673 | TCCATTTTTTTTCTGCTGC | 674 | GCAGCAGAAAAAAAATGGA |
| 675 | CCATTTTTTTTCTGCTGCT | 676 | AGCAGCAGAAAAAAAATGG |
| 677 | CATTTTTTTTCTGCTGCTT | 678 | AAGCAGCAGAAAAAAAATG |
| 679 | ATTTTTTTTCTGCTGCTTC | 680 | GAAGCAGCAGAAAAAAAAT |
| 681 | TTTTTTTTCTGCTGCTTCA | 682 | TGAAGCAGCAGAAAAAAAA |
| 683 | TTTTTTTCTGCTGCTTCAT | 684 | ATGAAGCAGCAGAAAAAAA |
| 685 | TTTTTTCTGCTGCTTCATC | 686 | GATGAAGCAGCAGAAAAAA |
| 687 | TTTTTCTGCTGCTTCATCG | 688 | CGATGAAGCAGCAGAAAAA |
| 689 | TTTTCTGCTGCTTCATCGC | 690 | GCGATGAAGCAGCAGAAAA |
| 691 | TTTCTGCTGCTTCATCGCT | 692 | AGCGATGAAGCAGCAGAAA |
| 693 | TTCTGCTGCTTCATCGCTG | 694 | CAGCGATGAAGCAGCAGAA |
| 695 | TCTGCTGCTTCATCGCTGT | 696 | ACAGCGATGAAGCAGCAGA |
| 697 | CTGCTGCTTCATCGCTGTA | 698 | TACAGCGATGAAGCAGCAG |
| 699 | TGCTGCTTCATCGCTGTAG | 700 | CTACAGCGATGAAGCAGCA |
| 701 | GCTGCTTCATCGCTGTAGC | 702 | GCTACAGCGATGAAGCAGC |
| 703 | CTGCTTCATCGCTGTAGCC | 704 | GGCTACAGCGATGAAGCAG |
| 705 | TGCTTCATCGCTGTAGCCA | 706 | TGGCTACAGCGATGAAGCA |
| 707 | GCTTCATCGCTGTAGCCAT | 708 | ATGGCTACAGCGATGAAGC |
| 709 | CTTCATCGCTGTAGCCATG | 710 | CATGGCTACAGCGATGAAG |
| 711 | TTCATCGCTGTAGCCATGG | 712 | CCATGGCTACAGCGATGAA |
| 713 | TCATCGCTGTAGCCATGGG | 714 | CCCATGGCTACAGCGATGA |
| 715 | CATCGCTGTAGCCATGGGA | 716 | TCCCATGGCTACAGCGATG |
| 717 | ATCGCTGTAGCCATGGGAA | 718 | TTCCCATGGCTACAGCGAT |
| 719 | TCGCTGTAGCCATGGGAAT | 720 | ATTCCCATGGCTACAGCGA |
| 721 | CGCTGTAGCCATGGGAATC | 722 | GATTCCCATGGCTACAGCG |
| 723 | GCTGTAGCCATGGGAATCC | 724 | GGATTCCCATGGCTACAGC |
| 725 | CTGTAGCCATGGGAATCCG | 726 | CGGATTCCCATGGCTACAG |
| 727 | TGTAGCCATGGGAATCCGT | 728 | ACGGATTCCCATGGCTACA |
| 729 | GTAGCCATGGGAATCCGTT | 730 | AACGGATTCCCATGGCTAC |
| 731 | TAGCCATGGGAATCCGTTT | 732 | AAACGGATTCCCATGGCTA |
| 733 | AGCCATGGGAATCCGTTTC | 734 | GAAACGGATTCCCATGGCT |
| 735 | GCCATGGGAATCCGTTTCA | 736 | TGAAACGGATTCCCATGGC |
| 737 | CCATGGGAATCCGTTTCAT | 738 | ATGAAACGGATTCCCATGG |
| 739 | CATGGGAATCCGTTTCATT | 740 | AATGAAACGGATTCCCATG |
| 741 | ATGGGAATCCGTTTCATTA | 742 | TAATGAAACGGATTCCCAT |
| 743 | TGGGAATCCGTTTCATTAT | 744 | ATAATGAAACGGATTCCCA |
| 745 | GGGAATCCGTTTCATTATT | 746 | AATAATGAAACGGATTCCC |
| 747 | GGAATCCGTTTCATTATTA | 748 | TAATAATGAAACGGATTCC |
| 749 | GAATCCGTTTCATTATTAT | 750 | ATAATAATGAAACGGATTC |
| 751 | AATCCGTTTCATTATTATG | 752 | CATAATAATGAAACGGATT |
| 753 | ATCCGTTTCATTATTATGG | 754 | CCATAATAATGAAACGGAT |
| 755 | TCCGTTTCATTATTATGGT | 756 | ACCATAATAATGAAACGGA |
| 757 | CCGTTTCATTATTATGGTA | 758 | TACCATAATAATGAAACGG |
| 759 | CGTTTCATTATTATGGTAA | 760 | TTACCATAATAATGAAACG |
| 761 | GTTTCATTATTATGGTAAC | 762 | GTTACCATAATAATGAAAC |
| 763 | TTTCATTATTATGGTAACA | 764 | TGTTACCATAATAATGAAA |
| 765 | TTCATTATTATGGTAACAA | 766 | TTGTTACCATAATAATGAA |
| 767 | TCATTATTATGGTAACAAT | 768 | ATTGTTACCATAATAATGA |
| 769 | CATTATTATGGTAACAATA | 770 | TATTGTTACCATAATAATG |
| 771 | ATTATTATGGTAACAATAT | 772 | ATATTGTTACCATAATAAT |
| 773 | TTATTATGGTAACAATATG | 774 | CATATTGTTACCATAATAA |
| 775 | TATTATGGTAACAATATGG | 776 | CCATATTGTTACCATAATA |
| 777 | ATTATGGTAACAATATGGA | 778 | TCCATATTGTTACCATAAT |
| 779 | TTATGGTAACAATATGGAG | 780 | CTCCATATTGTTACCATAA |
| 781 | TATGGTAACAATATGGAGT | 782 | ACTCCATATTGTTACCATA |
| 783 | ATGGTAACAATATGGAGTG | 784 | CACTCCATATTGTTACCAT |
| 785 | TGGTAACAATATGGAGTGC | 786 | GCACTCCATATTGTTACCA |
| 787 | GGTAACAATATGGAGTGCT | 788 | AGCACTCCATATTGTTACC |
| 789 | GTAACAATATGGAGTGCTG | 790 | CAGCACTCCATATTGTTAC |
| 791 | TAACAATATGGAGTGCTGT | 792 | ACAGCACTCCATATTGTTA |
| 793 | AACAATATGGAGTGCTGTA | 794 | TACAGCACTCCATATTGTT |
| 795 | ACAATATGGAGTGCTGTAT | 796 | ATACAGCACTCCATATTGT |
| 797 | CAATATGGAGTGCTGTATT | 798 | AATACAGCACTCCATATTG |
| 799 | AATATGGAGTGCTGTATTC | 800 | GAATACAGCACTCCATATT |
| 801 | ATATGGAGTGCTGTATTCC | 802 | GGAATACAGCACTCCATAT |
| 803 | TATGGAGTGCTGTATTCCT | 804 | AGGAATACAGCACTCCATA |
| 805 | ATGGAGTGCTGTATTCCTA | 806 | TAGGAATACAGCACTCCAT |
| 807 | TGGAGTGCTGTATTCCTAA | 808 | TTAGGAATACAGCACTCCA |
| 809 | GGAGTGCTGTATTCCTAAA | 810 | TTTAGGAATACAGCACTCC |
| 811 | GAGTGCTGTATTCCTAAAC | 812 | GTTTAGGAATACAGCACTC |
| 813 | AGTGCTGTATTCCTAAACT | 814 | AGTTTAGGAATACAGCACT |
| 815 | GTGCTGTATTCCTAAACTC | 816 | GAGTTTAGGAATACAGCAC |
| 817 | TGCTGTATTCCTAAACTCA | 818 | TGAGTTTAGGAATACAGCA |
| 819 | GCTGTATTCCTAAACTCAT | 820 | ATGAGTTTAGGAATACAGC |
| 821 | CTGTATTCCTAAACTCATT | 822 | AATGAGTTTAGGAATACAG |
| 823 | TGTATTCCTAAACTCATTA | 824 | TAATGAGTTTAGGAATACA |
| 825 | GtATTCCTAAACTCATTAT | 826 | ATAATGAGTTTAGGAATAC |
| 827 | TATTCCTAAACTCATTATT | 828 | AATAATGAGTTTAGGAATA |
| 829 | ATTCCTAAACTCATTATTC | 830 | GAATAATGAGTTTAGGAAT |
| 831 | TTCCTAAACTCATTATTCA | 832 | TGAATAATGAGTTTAGGAA |
| 833 | TCCTAAACTCATTATTCAA | 834 | TTGAATAATGAGTTTAGGA |
| 835 | CCTAAACTCATTATTCAAC | 836 | GTTGAATAATGAGTTTAGG |
| 837 | CTAAACTCATTATTCAACC | 838 | GGTTGAATAATGAGTTTAG |
| 839 | TAAACTCATTATTCAACCA | 840 | TGGTTGAATAATGAGTTTA |
| 841 | AAACTCATTATTCAACCAA | 842 | TTGGTTGAATAATGAGTTT |
| 843 | AACTCATTATTCAACCAAG | 844 | CTTGGTTGAATAATGAGTT |
| 845 | ACTCATTATTCAACCAAGA | 846 | TCTTGGTTGAATAATGAGT |
| 847 | CTCATTATTCAACCAAGAA | 848 | TTCTTGGTTGAATAATGAG |
| 849 | TCATTATTCAACCAAGAAG | 850 | CTTCTTGGTTGAATAATGA |
| 851 | CATTATTCAACCAAGAAGT | 852 | ACTTCTTGGTTGAATAATG |
| 853 | ATTATTCAACCAAGAAGTT | 854 | AACTTCTTGGTTGAATAAT |
| 855 | TTATTCAACCAAGAAGTTC | 856 | GAACTTCTTGGTTGAATAA |
| 857 | TATTCAACCAAGAAGTTCA | 858 | TGAACTTCTTGGTTGAATA |
| 859 | ATTCAACCAAGAAGTTCAA | 860 | TTGAACTTCTTGGTTGAAT |
| 861 | TTCAACCAAGAAGTTCAAA | 862 | TTTGAACTTCTTGGTTGAA |
| 863 | TCAACCAAGAAGTTCAAAT | 864 | ATTTGAACTTCTTGGTTGA |
| 865 | CAACCAAGAAGTTCAAATT | 866 | AATTTGAACTTCTTGGTTG |
| 867 | AACCAAGAAGTTCAAATTC | 868 | GAATTTGAACTTCTTGGTT |
| 869 | ACCAAGAAGTTCAAATTCC | 870 | GGAATTTGAACTTCTTGGT |
| 871 | CCAAGAAGTTCAAATTCCC | 872 | GGGAATTTGAACTTCTTGG |
| 873 | CAAGAAGTTCAAATTCCCT | 874 | AGGGAATTTGAACTTCTTG |
| 875 | AAGAAGTTCAAATTCCCTT | 876 | AAGGGAATTTGAACTTCTT |
| 877 | AGAAGTTCAAATTCCCTTG | 878 | CAAGGGAATTTGAACTTCT |
| 879 | GAAGTTCAAATTCCCTTGA | 880 | TCAAGGGAATTTGAACTTC |
| 881 | AAGTICAAATTCCCTTGAC | 882 | GTCAAGGGAATTTGAACTT |
| 883 | AGTTCAAATTCCCTTGACC | 884 | GGTCAAGGGAATTTGAACT |
| 885 | GTTCAAATTCCCTTGACCG | 886 | CGGTCAAGGGAATTTGAAC |
| 887 | TTCAAATTCCCTTGACCGA | 888 | TCGGTCAAGGGAATTTGAA |
| 889 | TCAAATTCCCTTGACCGAA | 890 | TTCGGTCAAGGGAATTTGA |
| 891 | CAAATTCCCTTGACCGAAA | 892 | TTTCGGTCAAGGGAATTTG |
| 893 | AAATTCCCTTGACCGAAAG | 894 | CTTTCGGTCAAGGGAATTT |
| 895 | AATTCCCTTGACCGAAAGT | 896 | ACTTTCGGTCAAGGGAATT |
| 897 | ATTCCCTTGACCGAAAGTT | 898 | AACTTTCGGTCAAGGGAAT |
| 899 | TTCCCTTGACCGAAAGTTA | 900 | TAACTTTCGGTCAAGGGAA |
| 901 | TCCCTTGACCGAAAGTTAC | 902 | GTAACTTTCGGTCAAGGGA |
| 903 | CCCTTGACCGAAAGTTACT | 904 | AGTAACTTTCGGTCAAGGG |
| 905 | CCTTGACCGAAAGTTACTG | 906 | CAGTAACTTTCGGTCAAGG |
| 907 | CTTGACCGAAAGTTACTGT | 908 | ACAGTAACTTTCGGTCAAG |
| 909 | TTGACCGAAAGTTACTGTG | 910 | CACAGTAACTTTCGGTCAA |
| 911 | TGACCGAAAGTTACTGTGG | 912 | CCACAGTAACTTTCGGTCA |
| 913 | GACCGAAAGTTACTGTGGC | 914 | GCCACAGTAACTTTCGGTC |
| 915 | ACCGAAAGTTACTGTGGCC | 916 | GGCCACAGTAACTTTCGGT |
| 917 | CCGAAAGTTACTGTGGCCC | 918 | GGGCCACAGTAACTTTCGG |
| 919 | CGAAAGTTACTGTGGCCCA | 920 | TGGGCCACAGTAACTTTCG |
| 921 | GAAAGTTACTGTGGCCCAT | 922 | ATGGGCCACAGTAACTTTC |
| 923 | AAAGTTACTGTGGCCCATG | 924 | CATGGGCCACAGTAACTTT |
| 925 | AAGTTACTGTGGCCCATGT | 926 | ACATGGGCCACAGTAACTT |
| 927 | AGTTACTGTGGCCCATGTC | 928 | GACATGGGCCACAGTAACT |
| 929 | GTTACTGTGGCCCATGTCC | 930 | GGACATGGGCCACAGTAAC |
| 931 | TTACTGTGGCCCATGTCCT | 932 | AGGACATGGGCCACAGTAA |
| 933 | TACTGTGGCCCATGTCCTA | 934 | TAGGACATGGGCCACAGTA |
| 935 | ACTGTGGCCCATGTCCTAA | 936 | TTAGGACATGGGCCACAGT |
| 937 | CTGTGGCCCATGTCCTAAA | 938 | TTTAGGACATGGGCCACAG |
| 939 | TGTGGCCCATGTCCTAAAA | 940 | TTTTAGGACATGGGCCACA |
| 941 | GTGGCCCATGTCCTAAAAA | 942 | TTTTTAGGACATGGGCCAC |
| 943 | TGGCCCATGTCCTAAAAAC | 944 | GTTTTTAGGACATGGGCCA |
| 945 | GGCCCATGTCCTAAAAACT | 946 | AGTTTTTAGGACATGGGCC |
| 947 | GCCCATGTCCTAAAAACTG | 948 | CAGTTTTTAGGACATGGGC |
| 949 | CCCATGTCCTAAAAACTGG | 950 | CCAGTTTTTAGGACATGGG |
| 951 | CCATGTCCTAAAAACTGGA | 952 | TCCAGTTTTTAGGACATGG |
| 953 | CATGTCCTAAAAACTGGAT | 954 | ATCCAGTTTTTAGGACATG |
| 955 | ATGTCCTAAAAACTGGATA | 956 | TATCCAGTTTTTAGGACAT |
| 957 | TGTCCTAAAAACTGGATAT | 958 | ATATCCAGTTTTTAGGACA |
| 959 | GTCCTAAAAACTGGATATG | 960 | CATATCCAGTTTTTAGGAC |
| 961 | TCCTAAAAACTGGATATGT | 962 | ACATATCCAGTTTTTAGGA |
| 963 | CCTAAAAACTGGATATGTT | 964 | AACATATCCAGTTTTTAGG |
| 965 | CTAAAAACTGGATATGTTA | 966 | TAACATATCCAGTTTTTAG |
| 967 | TAAAAACTGGATATGTTAC | 968 | GTAACATATCCAGTTTTTA |
| 969 | AAAAACTGGATATGTTACA | 970 | TGTAACATATCCAGTTTTT |
| 971 | AAAACTGGATATGTTACAA | 972 | TTGTAACATATCCAGTTTT |
| 973 | AAACTGGATATGTTACAAA | 974 | TTTGTAACATATCCAGTTT |
| 975 | AACTGGATATGTTACAAAA | 976 | TTTTGTAACATATCCAGTT |
| 977 | ACTGGATATGTTACAAAAA | 978 | TTTTTGTAACATATCCAGT |
| 979 | CTGGATATGTTACAAAAAT | 980 | ATTTTTGTAACATATCCAG |
| 981 | TGGATATGTTACAAAAATA | 982 | TATTTTTGTAACATATCCA |
| 983 | GGATATGTTACAAAAATAA | 984 | TTATTTTTGTAACATATCC |
| 985 | GATATGTTACAAAAATAAC | 986 | GTTATTTTTGTAACATATC |
| 987 | ATATGTTACAAAAATAACT | 988 | AGTTATTTTTGTAACATAT |
| 989 | TATGTTACAAAAATAACTG | 990 | CAGTTATTTTTGTAACATA |
| 991 | ATGTTACAAAAATAACTGC | 992 | GCAGTTATTTTTGTAACAT |
| 993 | TGTTACAAAAATAACTGCT | 994 | AGCAGTTATTTTTGTAACA |
| 995 | GTTACAAAAATAACTGCTA | 996 | TAGCAGTTATTTTTGTAAC |
| 997 | TTACAAAAATAACTGCTAC | 998 | GTAGCAGTTATTTTTGTAA |
| 999 | TACAAAAATAACTGCTACC | 1000 | GGTAGCAGTTATTTTTGTA |
| 1001 | ACAAAAATAACTGCTACCA | 1002 | TGGTAGCAGTTATTTTTGT |
| 1003 | CAAAAATAACTGCTACCAA | 1004 | TTGGTAGCAGTTATTTTTG |
| 1005 | AAAAATAACTGCTACCAAT | 1006 | ATTGGTAGCAGTTATTTTT |
| 1007 | AAAATAACTGCTACCAATT | 1008 | AATTGGTAGCAGTTATTTT |
| 1009 | AAATAACTGCTACCAATTT | 1010 | AAATTGGTAGCAGTTATTT |
| 1011 | AATAACTGCTACCAATTTT | 1012 | AAAATTGGTAGCAGTTATT |
| 1013 | ATAACTGCTACCAATTTTT | 1014 | AAAAATTGGTAGCAGTTAT |
| 1015 | TAACTGCTACCAATTTTTT | 1016 | AAAAAATTGGTAGCAGTTA |
| 1017 | AACTGCTACCAATTTTTTG | 1018 | CAAAAAATTGGTAGCAGTT |
| 1019 | ACTGCTACCAATTTTTTGA | 1020 | TCAAAAAATTGGTAGCAGT |
| 1021 | CTGCTACCAATTTTTTGAT | 1022 | ATCAAAAAATTGGTAGCAG |
| 1023 | TGCTACCAATTTTTTGATG | 1024 | CATCAAAAAATTGGTAGCA |
| 1025 | GCTACCAATTTTTTGATGA | 1026 | TCATCAAAAAATTGGTAGC |
| 1027 | CTACCAATTTTTTGATGAG | 1028 | CTCATCAAAAAATTGGTAG |
| 1029 | TACCAATTTTTTGATGAGA | 1030 | TCTCATCAAAAAATTGGTA |
| 1031 | ACCAATTTTTTGATGAGAG | 1032 | CTCTCATCAAAAAATTGGT |
| 1033 | CCAATTTTTTGATGAGAGT | 1034 | ACTCTCATCAAAAAATTGG |
| 1035 | CAATTTTTTGATGAGAGTA | 1036 | TACTCTCATCAAAAAATTG |
| 1037 | AATTTTTTGATGAGAGTAA | 1038 | TTACTCTCATCAAAAAATT |
| 1039 | ATTTTTTGATGAGAGTAAA | 1040 | TTTACTCTCATCAAAAAAT |
| 1041 | TTTTTTGATGAGAGTAAAA | 1042 | TTTTACTCTCATCAAAAAA |
| 1043 | TTTTTGATGAGAGTAAAAA | 1044 | TTTTTACTCTCATCAAAAA |
| 1045 | TTTTGATGAGAGTAAAAAC | 1046 | GTTTTTACTCTCATCAAAA |
| 1047 | TTTGATGAGAGTAAAAACT | 1048 | AGTTTTTACTCTCATCAAA |
| 1049 | TTGATGAGAGTAAAAACTG | 1050 | CAGTTTTTACTCTCATCAA |
| 1051 | TGATGAGAGTAAAAACTGG | 1052 | CCAGTTTTTACTCTCATCA |
| 1053 | GATGAGAGTAAAAACTGGT | 1054 | ACCAGTTTTTACTCTCATC |
| 1055 | ATGAGAGTAAAAACTGGTA | 1056 | TACCAGTTTTTACTCTCAT |
| 1057 | TGAGAGTAAAAACTGGTAT | 1058 | ATACCAGTTTTTACTCTCA |
| 1059 | GAGAGTAAAAACTGGTATG | 1060 | CATACCAGTTTTTACTCTC |
| 1061 | AGAGTAAAAACTGGTATGA | 1062 | TCATACCAGTTTTTACTCT |
| 1063 | GAGTAAAAACTGGTATGAG | 1064 | CTCATACCAGTTTTTACTC |
| 1065 | AGTAAAAACTGGTATGAGA | 1066 | TCTCATACCAGTTTTTACT |
| 1067 | GTAAAAACTGGTATGAGAG | 1068 | CTCTCATACCAGTTTTTAC |
| 1069 | TAAAAACTGGTATGAGAGC | 1070 | GCTCTCATACCAGTTTTTA |
| 1071 | AAAAACTGGTATGAGAGCC | 1072 | GGCTCTCATACCAGTTTTT |
| 1073 | AAAACTGGTATGAGAGCCA | 1074 | TGGCTCTCATACCAGTTTT |
| 1075 | AAACTGGTATGAGAGCCAG | 1076 | CTGGCTCTCATACCAGTTT |
| 1077 | AACTGGTATGAGAGCCAGG | 1078 | CCTGGCTCTCATACCAGTT |
| 1079 | ACTGGTATGAGAGCCAGGC | 1080 | GCCTGGCTCTCATACCAGT |
| 1081 | CTGGTATGAGAGCCAGGCT | 1082 | AGCCTGGCTCTCATACCAG |
| 1083 | TGGTATGAGAGCCAGGCTT | 1084 | AAGCCTGGCTCTCATACCA |
| 1085 | GGTATGAGAGCCAGGCTTC | 1086 | GAAGCCTGGCTCTCATACC |
| 1087 | GTATGAGAGCCAGGCTTCT | 1088 | AGAAGCCTGGCTCTCATAC |
| 1089 | TATGAGAGCCAGGCTTCTT | 1090 | AAGAAGCCTGGCTCTCATA |
| 1091 | ATGAGAGCCAGGCTTCTTG | 1092 | CAAGAAGCCTGGCTCTCAT |
| 1093 | TGAGAGCCAGGCTTCTTGT | 1094 | ACAAGAAGCCTGGCTCTCA |
| 1095 | GAGAGCCAGGCTTCTTGTA | 1096 | TACAAGAAGCCTGGCTCTC |
| 1097 | AGAGCCAGGCTTCTTGTAT | 1098 | ATACAAGAAGCCTGGCTCT |
| 1099 | GAGCCAGGCTTCTTGTATG | 1100 | CATACAAGAAGCCTGGCTC |
| 1101 | AGCCAGGCTTCTTGTATGT | 1102 | ACATACAAGAAGCCTGGCT |
| 1103 | GCCAGGCTTCTTGTATGTC | 1104 | GACATACAAGAAGCCTGGC |
| 1105 | CCAGGCTTCTTGTATGTCT | 1106 | AGACATACAAGAAGCCTGG |
| 1107 | CAGGCTTCTTGTATGTCTC | 1108 | GAGACATACAAGAAGCCTG |
| 1109 | AGGCTTCTTGTATGTCTCA | 1110 | TGAGACATACAAGAAGCCT |
| 1111 | GGCTTCTTGTATGTCTCAA | 1112 | TTGAGACATACAAGAAGCC |
| 1113 | GCTTCTTGTATGTCTCAAA | 1114 | TTTGAGACATACAAGAAGC |
| 1115 | CTTCTTGTATGTCTCAAAA | 1116 | TTTTGAGACATACAAGAAG |
| 1117 | TTCTTGTATGTCTCAAAAT | 1118 | ATTTTGAGACATACAAGAA |
| 1119 | TCTTGTATGTCTCAAAATG | 1120 | CATTTTGAGACATACAAGA |
| 1121 | CTTGTATGTCTCAAAATGC | 1122 | GCATTTTGAGACATACAAG |
| 1123 | TTGTATGTCTCAAAATGCC | 1124 | GGCATTTTGAGACATACAA |
| 1125 | TGTATGTCTCAAAATGCCA | 1126 | TGGCATTTTGAGACATACA |
| 1127 | GTATGTCTCAAAATGCCAG | 1128 | CTGGCATTTTGAGACATAC |
| 1129 | TATGTCTCAAAATGCCAGC | 1130 | GCTGGCATTTTGAGACATA |
| 1131 | ATGTCTCAAAATGCCAGCC | 1132 | GGCTGGCATTTTGAGACAT |
| 1133 | TGTCTCAAAATGCCAGCCT | 1134 | AGGCTGGCATTTTGAGACA |
| 1135 | GTCTCAAAATGCCAGCCTT | 1136 | AAGGCTGGCATTTTGAGAC |
| 1137 | TCTCAAAATGCCAGCCTTC | 1138 | GAAGGCTGGCATTTTGAGA |
| 1139 | CTCAAAATGCCAGCCTTCT | 1140 | AGAAGGCTGGCATTTTGAG |
| 1141 | TCAAAATGCCAGCCTTCTG | 1142 | CAGAAGGCTGGCATTTTGA |
| 1143 | CAAAATGCCAGCCTTCTGA | 1144 | TCAGAAGGCTGGCATTTTG |
| 1145 | AAAATGCCAGCCTTCTGAA | 1146 | TTCAGAAGGCTGGCATTTT |
| 1147 | AAATGCCAGCCTTCTGAAA | 1148 | TTTCAGAAGGCTGGCATTT |
| 1149 | AATGCCAGCCTTCTGAAAG | 1150 | CTTTCAGAAGGCTGGCATT |
| 1151 | ATGCCAGCCTTCTGAAAGT | 1152 | ACTTTCAGAAGGCTGGCAT |
| 1153 | TGCCAGCCTTCTGAAAGTA | 1154 | TACTTTCAGAAGGCTGGCA |
| 1155 | GCCAGCCTTCTGAAAGTAT | 1156 | ATACTTTCAGAAGGCTGGC |
| 1157 | CCAGCCTTCTGAAAGTATA | 1158 | TATACTTTCAGAAGGCTGG |
| 1159 | CAGCCTTCTGAAAGTATAC | 1160 | GTATACTTTCAGAAGGCTG |
| 1161 | AGCCTTCTGAAAGTATACA | 1162 | TGTATACTTTCAGAAGGCT |
| 1163 | GCCTTCTGAAAGTATACAG | 1164 | CTGTATACTTTCAGAAGGC |
| 1165 | CCTTCTGAAAGTATACAGC | 1166 | GCTGTATACTTTCAGAAGG |
| 1167 | CTTCTGAAAGTATACAGCA | 1168 | TGCTGTATACTTTCAGAAG |
| 1169 | TTCTGAAAGTATACAGCAA | 1170 | TTGCTGTATACTTTCAGAA |
| 1171 | TCTGAAAGTATACAGCAAA | 1172 | TTTGCTGTATACTTTCAGA |
| 1173 | CTGAAAGTATACAGCAAAG | 1174 | CTTTGCTGTATACTTTCAG |
| 1175 | TGAAAGTATACAGCAAAGA | 1176 | TCTTTGCTGTATACTTTCA |
| 1177 | GAAAGTATACAGCAAAGAG | 1178 | CTCTTTGCTGTATACTTTC |
| 1179 | AAAGTATACAGCAAAGAGG | 1180 | CCTCTTTGCTGTATACTTT |
| 1181 | AAGTATACAGCAAAGAGGA | 1182 | TCCTCTTTGCTGTATACTT |
| 1183 | AGTATACAGCAAAGAGGAC | 1184 | GTCCTCTTTGCTGTATACT |
| 1185 | GTATACAGCAAAGAGGACC | 1186 | GGTCCTCTTTGCTGTATAC |
| 1187 | TATACAGCAAAGAGGACCA | 1188 | TGGTCCTCTTTGCTGTATA |
| 1189 | ATACAGCAAAGAGGACCAG | 1190 | CTGGTCCTCTTTGCTGTAT |
| 1191 | TACAGCAAAGAGGACCAGG | 1192 | CCTGGTCCTCTTTGCTGTA |
| 1193 | ACAGCAAAGAGGACCAGGA | 1194 | TCCTGGTCCTCTTTGCTGT |
| 1195 | CAGCAAAGAGGACCAGGAT | 1196 | ATCCTGGTCCTCTTTGCTG |
| 1197 | AGCAAAGAGGACCAGGATT | 1198 | AATCCTGGTCCTCTTTGCT |
| 1199 | GCAAAGAGGACCAGGATTT | 1200 | AAATCCTGGTCCTCTTTGC |
| 1201 | CAAAGAGGACCAGGATTTA | 1202 | TAAATCCTGGTCCTCTTTG |
| 1203 | AAAGAGGACCAGGATTTAC | 1204 | GTAAATCCTGGTCCTCTTT |
| 1205 | AAGAGGACCAGGATTTACT | 1206 | AGTAAATCCTGGTCCTCTT |
| 1207 | AGAGGACCAGGATTTACTT | 1208 | AAGTAAATCCTGGTCCTCT |
| 1209 | GAGGACCAGGATTTACTTA | 1210 | TAAGTAAATCCTGGTCCTC |
| 1211 | AGGACCAGGATTTACTTAA | 1212 | TTAAGTAAATCCTGGTCCT |
| 1213 | GGACCAGGATTTACTTAAA | 1214 | TTTAAGTAAATCCTGGTCC |
| 1215 | GACCAGGATTTACTTAAAC | 1216 | GTTTAAGTAAATCCTGGTC |
| 1217 | ACCAGGATTTACTTAAACT | 1218 | AGTTTAAGTAAATCCTGGT |
| 1219 | CCAGGATTTACTTAAACTG | 1220 | CAGTTTAAGTAAATCCTGG |
| 1221 | CAGGATTTACTTAAACTGG | 1222 | CCAGTTTAAGTAAATCCTG |
| 1223 | AGGATTTACTTAAACTGGT | 1224 | ACCAGTTTAAGTAAATCCT |
| 1225 | GGATTTACTTAAACTGGTG | 1226 | CACCAGTTTAAGTAAATCC |
| 1227 | GATTTACTTAAACTGGTGA | 1228 | TCACCAGTTTAAGTAAATC |
| 1229 | ATTTACTTAAACTGGTGAA | 1230 | TTCACCAGTTTAAGTAAAT |
| 1231 | TTTACTTAAACTGGTGAAG | 1232 | CTTCACCAGTTTAAGTAAA |
| 1233 | TTACTTAAACTGGTGAAGT | 1234 | ACTTCACCAGTTTAAGTAA |
| 1235 | TACTTAAACTGGTGAAGTC | 1236 | GACTTCACCAGTTTAAGTA |
| 1237 | ACTTAAACTGGTGAAGTCA | 1238 | TGACTTCACCAGTTTAAGT |
| 1239 | CTTAAACTGGTGAAGTCAT | 1240 | ATGACTTCACCAGTTTAAG |
| 1241 | TTAAACTGGTGAAGTCATA | 1242 | TATGACTTCACCAGTTTAA |
| 1243 | TAAACTGGTGAAGTCATAT | 1244 | ATATGACTTCACCAGTTTA |
| 1245 | AAACTGGTGAAGTCATATC | 1246 | GATATGACTTCACCAGTTT |
| 1247 | AACTGGTGAAGTCATATCA | 1248 | TGATATGACTTCACCAGTT |
| 1249 | ACTGGTGAAGTCATATCAT | 1250 | ATGATATGACTTCACCAGT |
| 1251 | CTGGTGAAGTCATATCATT | 1252 | AATGATATGACTTCACCAG |
| 1253 | TGGTGAAGTCATATCATTG | 1254 | CAATGATATGACTTCACCA |
| 1255 | GGTGAAGTCATATCATTGG | 1256 | CCAATGATATGACTTCACC |
| 1257 | GTGAAGTCATATCATTGGA | 1258 | TCCAATGATATGACTTCAC |
| 1259 | TGAAGTCATATCATTGGAT | 1260 | ATCCAATGATATGACTTCA |
| 1261 | GAAGTCATATCATTGGATG | 1262 | CATCCAATGATATGACTTC |
| 1263 | AAGTCATATCATTGGATGG | 1264 | CCATCCAATGATATGACTT |
| 1265 | AGTCATATCATTGGATGGG | 1266 | CCCATCCAATGATATGACT |
| 1267 | GTCATATCATTGGATGGGA | 1268 | TCCCATCCAATGATATGAC |
| 1269 | TCATATCATTGGATGGGAC | 1270 | GTCCCATCCAATGATATGA |
| 1271 | CATATCATTGGATGGGACT | 1272 | AGTCCCATCCAATGATATG |
| 1273 | ATATCATTGGATGGGACTA | 1274 | TAGTCCCATCCAATGATAT |
| 1275 | TATCATTGGATGGGACTAG | 1276 | CTAGTCCCATCCAATGATA |
| 1277 | ATCATTGGATGGGACTAGT | 1278 | ACTAGTCCCATCCAATGAT |
| 1279 | TCATTGGATGGGACTAGTA | 1280 | TACTAGTCCCATCCAATGA |
| 1281 | CATTGGATGGGACTAGTAC | 1282 | GTACTAGTCCCATCCAATG |
| 1283 | ATTGGATGGGACTAGTACA | 1284 | TGTACTAGTCCCATCCAAT |
| 1285 | TTGGATGGGACTAGTACAC | 1286 | GTGTACTAGTCCCATCCAA |
| 1287 | TGGATGGGACTAGTACACA | 1288 | TGTGTACTAGTCCCATCCA |
| 1289 | GGATGGGACTAGTACACAT | 1290 | ATGTGTACTAGTCCCATCC |
| 1291 | GATGGGACTAGTACACATT | 1292 | AATGTGTACTAGTCCCATC |
| 1293 | ATGGGACTAGTACACATTC | 1294 | GAATGTGTACTAGTCCCAT |
| 1295 | TGGGACTAGTACACATTCC | 1296 | GGAATGTGTACTAGTCCCA |
| 1297 | GGGACTAGTACACATTCCA | 1298 | TGGAATGTGTACTAGTCCC |
| 1299 | GGACTAGTACACATTCCAA | 1300 | TTGGAATGTGTACTAGTCC |
| 1301 | GACTAGTACACATTCCAAC | 1302 | GTTGGAATGTGTACTAGTC |
| 1303 | ACTAGTACACATTCCAACA | 1304 | TGTTGGAATGTGTACTAGT |
| 1305 | CTAGTACACATTCCAACAA | 1306 | TTGTTGGAATGTGTACTAG |
| 1307 | TAGTACACATTCCAACAAA | 1308 | TTTGTTGGAATGTGTACTA |
| 1309 | AGTACACATTCCAACAAAT | 1310 | ATTTGTTGGAATGTGTACT |
| 1311 | GTACACATTCCAACAAATG | 1312 | CATTTGTTGGAATGTGTAC |
| 1313 | TACACATTCCAACAAATGG | 1314 | CCATTTGTTGGAATGTGTA |
| 1315 | ACACATTCCAACAAATGGA | 1316 | TCCATTTGTTGGAATGTGT |
| 1317 | CACATTCCAACAAATGGAT | 1318 | ATCCATTTGTTGGAATGTG |
| 1319 | ACATTCCAACAAATGGATC | 1320 | GATCCATTTGTTGGAATGT |
| 1321 | CATTCCAACAAATGGATCT | 1322 | AGATCCATTTGTTGGAATG |
| 1323 | ATTCCAACAAATGGATCTT | 1324 | AAGATCCATTTGTTGGAAT |
| 1325 | TTCCAACAAATGGATCTTG | 1326 | CAAGATCCATTTGTTGGAA |
| 1327 | TCCAACAAATGGATCTTGG | 1328 | CCAAGATCCATTTGTTGGA |
| 1329 | CCAACAAATGGATCTTGGC | 1330 | GCCAAGATCCATTTGTTGG |
| 1331 | CAACAAATGGATCTTGGCA | 1332 | TGCCAAGATCCATTTGTTG |
| 1333 | AACAAATGGATCTTGGCAG | 1334 | CTGCCAAGATCCATTTGTT |
| 1335 | ACAAATGGATCTTGGCAGT | 1336 | ACTGCCAAGATCCATTTGT |
| 1337 | CAAATGGATCTTGGCAGTG | 1338 | CACTGCCAAGATCCATTTG |
| 1339 | AAATGGATCTTGGCAGTGG | 1340 | CCACTGCCAAGATCCATTT |
| 1341 | AATGGATCTTGGCAGTGGG | 1342 | CCCACTGCCAAGATCCATT |
| 1343 | ATGGATCTTGGCAGTGGGA | 1344 | TCCCACTGCCAAGATCCAT |
| 1345 | TGGATCTTGGCAGTGGGAA | 1346 | TTCCCACTGCCAAGATCCA |
| 1347 | GGATCTTGGCAGTGGGAAG | 1348 | CTTCCCACTGCCAAGATCC |
| 1349 | GATCTTGGCAGTGGGAAGA | 1350 | TCTTCCCACTGCCAAGATC |
| 1351 | ATCTTGGCAGTGGGAAGAT | 1352 | ATCTTCCCACTGCCAAGAT |
| 1353 | TCTTGGCAGTGGGAAGATG | 1354 | CATCTTCCCACTGCCAAGA |
| 1355 | CTTGGCAGTGGGAAGATGG | 1356 | CCATCTTCCCACTGCCAAG |
| 1357 | TTGGCAGTGGGAAGATGGC | 1358 | GCCATCTTCCCACTGCCAA |
| 1359 | TGGCAGTGGGAAGATGGCT | 1360 | AGCCATCTTCCCACTGCCA |
| 1361 | GGCAGTGGGAAGATGGCTC | 1362 | GAGCCATCTTCCCACTGCC |
| 1363 | GCAGTGGGAAGATGGCTCC | 1364 | GGAGCCATCTTCCCACTGC |
| 1365 | CAGTGGGAAGATGGCTCCA | 1366 | TGGAGCCATCTTCCCACTG |
| 1367 | AGTGGGAAGATGGCTCCAT | 1368 | ATGGAGCCATCTTCCCACT |
| 1369 | GTGGGAAGATGGCTCCATT | 1370 | AATGGAGCCATCTTCCCAC |
| 1371 | TGGGAAGATGGCTCCATTC | 1372 | GAATGGAGCCATCTTCCCA |
| 1373 | GGGAAGATGGCTCCATTCT | 1374 | AGAATGGAGCCATCTTCCC |
| 1375 | GGAAGATGGCTCCATTCTC | 1376 | GAGAATGGAGCCATCTTCC |
| 1377 | GAAGATGGCTCCATTCTCT | 1378 | AGAGAATGGAGCCATCTTC |
| 1379 | AAGATGGCTCCATTCTCTC | 1380 | GAGAGAATGGAGCCATCTT |
| 1381 | AGATGGCTCCATTCTCTCA | 1382 | TGAGAGAATGGAGCCATCT |
| 1383 | GATGGCTCCATTCTCTCAC | 1384 | GTGAGAGAATGGAGCCATC |
| 1385 | ATGGCTCCATTCTCTCACC | 1386 | GGTGAGAGAATGGAGCCAT |
| 1387 | TGGCTCCATTCTCTCACCC | 1388 | GGGTGAGAGAATGGAGCCA |
| 1389 | GGCTCCATTCTCTCACCCA | 1390 | TGGGTGAGAGAATGGAGCC |
| 1391 | GCTCCATTCTCTCACCCAA | 1392 | TTGGGTGAGAGAATGGAGC |
| 1393 | CTCCATTCTCTCACCCAAC | 1394 | GTTGGGTGAGAGAATGGAG |
| 1395 | TCCATTCTCTCACCCAACC | 1396 | GGTTGGGTGAGAGAATGGA |
| 1397 | CCATTCTCTCACCCAACCT | 1398 | AGGTTGGGTGAGAGAATGG |
| 1399 | CATTCTCTCACCCAACCTA | 1400 | TAGGTTGGGTGAGAGAATG |
| 1401 | ATTCTCTCACCCAACCTAC | 1402 | GTAGGTTGGGTGAGAGAAT |
| 1403 | TTCTCTCACCCAACCTACT | 1404 | AGTAGGTTGGGTGAGAGAA |
| 1405 | TCTCTCACCCAACCTACTA | 1406 | TAGTAGGTTGGGTGAGAGA |
| 1407 | CTCTCACCCAACCTACTAA | 1408 | TTAGTAGGTTGGGTGAGAG |
| 1409 | TCTCACCCAACCTACTAAC | 1410 | GTTAGTAGGTTGGGTGAGA |
| 1411 | CTCACCCAACCTACTAACA | 1412 | TGTTAGTAGGTTGGGTGAG |
| 1413 | TCACCCAACCTACTAACAA | 1414 | TTGTTAGTAGGTTGGGTGA |
| 1415 | CACCCAACCTACTAACAAT | 1416 | ATTGTTAGTAGGTTGGGTG |
| 1417 | ACCCAACCTACTAACAATA | 1418 | TATTGTTAGTAGGTTGGGT |
| 1419 | CCCAACCTACTAACAATAA | 1420 | TTATTGTTAGTAGGTTGGG |
| 1421 | CCAACCTACTAACAATAAT | 1422 | ATTATTGTTAGTAGGTTGG |
| 1423 | CAACCTACTAACAATAATT | 1424 | AATTATTGTTAGTAGGTTG |
| 1425 | AACCTACTAACAATAATTG | 1426 | CAATTATTGTTAGTAGGTT |
| 1427 | ACCTACTAACAATAATTGA | 1428 | TCAATTATTGTTAGTAGGT |
| 1429 | CCTACTAACAATAATTGAA | 1430 | TTCAATTATTGTTAGTAGG |
| 1431 | CTACTAACAATAATTGAAA | 1432 | TTTCAATTATTGTTAGTAG |
| 1433 | TACTAACAATAATTGAAAT | 1434 | ATTTCAATTATTGTTAGTA |
| 1435 | ACTAACAATAATTGAAATG | 1436 | CATTTCAATTATTGTTAGT |
| 1437 | CTAACAATAATTGAAATGC | 1438 | GCATTTCAATTATTGTTAG |
| 1439 | TAACAATAATTGAAATGCA | 1440 | TGCATTTCAATTATTGTTA |
| 1441 | AACAATAATTGAAATGCAG | 1442 | CTGCATTTCAATTATTGTT |
| 1443 | ACAATAATTGAAATGCAGA | 1444 | TCTGCATTTCAATTATTGT |
| 1445 | CAATAATTGAAATGCAGAA | 1446 | TTCTGCATTTCAATTATTG |
| 1447 | AATAATTGAAATGCAGAAG | 1448 | CTTCTGCATTTCAATTATT |
| 1449 | ATAATTGAAATGCAGAAGG | 1450 | CCTTCTGCATTTCAATTAT |
| 1451 | TAATTGAAATGCAGAAGGG | 1452 | CCCTTCTGCATTTCAATTA |
| 1453 | AATTGAAATGCAGAAGGGA | 1454 | TCCCTTCTGCATTTCAATT |
| 1455 | ATTGAAATGCAGAAGGGAG | 1456 | CTCCCTTCTGCATTTCAAT |
| 1457 | TTGAAATGCAGAAGGGAGA | 1458 | TCTCCCTTCTGCATTTCAA |
| 1459 | TGAAATGCAGAAGGGAGAC | 1460 | GTCTCCCTTCTGCATTTCA |
| 1461 | GAAATGCAGAAGGGAGACT | 1462 | AGTCTCCCTTCTGCATTTC |
| 1463 | AAATGCAGAAGGGAGACTG | 1464 | CAGTCTCCCTTCTGCATTT |
| 1465 | AATGCAGAAGGGAGACTGT | 1466 | ACAGTCTCCCTTCTGCATT |
| 1467 | ATGCAGAAGGGAGACTGTG | 1468 | CACAGTCTCCCTTCTGCAT |
| 1469 | TGCAGAAGGGAGACTGTGC | 1470 | GCACAGTCTCCCTTCTGCA |
| 1471 | GCAGAAGGGAGACTGTGCA | 1472 | TGCACAGTCTCCCTTCTGC |
| 1473 | CAGAAGGGAGACTGTGCAC | 1474 | GTGCACAGTCTCCCTTCTG |
| 1475 | AGAAGGGAGACTGTGCACT | 1476 | AGTGCACAGTCTCCCTTCT |
| 1477 | GAAGGGAGACTGTGCACTC | 1478 | GAGTGCACAGTCTCCCTTC |
| 1479 | AAGGGAGACTGTGCACTCT | 1480 | AGAGTGCACAGTCTCCCTT |
| 1481 | AGGGAGACTGTGCACTCTA | 1482 | TAGAGTGCACAGTCTCCCT |
| 1483 | GGGAGACTGTGCACTCTAT | 1484 | ATAGAGTGCACAGTCTCCC |
| 1485 | GGAGACTGTGCACTCTATG | 1486 | CATAGAGTGCACAGTCTCC |
| 1487 | GAGACTGTGCACTCTATGC | 1488 | GCATAGAGTGCACAGTCTC |
| 1489 | AGACTGTGCACTCTATGCC | 1490 | GGCATAGAGTGCACAGTCT |
| 1491 | GACTGTGCACTCTATGCCT | 1492 | AGGCATAGAGTGCACAGTC |
| 1493 | ACTGTGCACTCTATGCCTC | 1494 | GAGGCATAGAGTGCACAGT |
| 1495 | CTGTGCACTCTATGCCTCG | 1496 | CGAGGCATAGAGTGCACAG |
| 1497 | TGTGCACTCTATGCCTCGA | 1498 | TCGAGGCATAGAGTGCACA |
| 1499 | GTGCACTCTATGCCTCGAG | 1500 | CTCGAGGCATAGAGTGCAC |
| 1501 | TGCACTCTATGCCTCGAGC | 1502 | GCTCGAGGCATAGAGTGCA |
| 1503 | GCACTCTATGCCTCGAGCT | 1504 | AGCTCGAGGCATAGAGTGC |
| 1505 | CACTCTATGCCTCGAGCTT | 1506 | AAGCTCGAGGCATAGAGTG |
| 1507 | ACTCTATGCCTCGAGCTTT | 1508 | AAAGCTCGAGGCATAGAGT |
| 1509 | CTCTATGCCTCGAGCTTTA | 1510 | TAAAGCTCGAGGCATAGAG |
| 1511 | TCTATGCCTCGAGCTTTAA | 1512 | TTAAAGCTCGAGGCATAGA |
| 1513 | CTATGCCTCGAGCTTTAAA | 1514 | TTTAAAGCTCGAGGCATAG |
| 1515 | TATGCCTCGAGCTTTAAAG | 1516 | CTTTAAAGCTCGAGGCATA |
| 1517 | ATGCCTCGAGCTTTAAAGG | 1518 | CCTTTAAAGCTCGAGGCAT |
| 1519 | TGCCTCGAGCTTTAAAGGC | 1520 | GCCTTTAAAGCTCGAGGCA |
| 1521 | GCCTCGAGCTTTAAAGGCT | 1522 | AGCCTTTAAAGCTCGAGGC |
| 1523 | CCTCGAGCTTTAAAGGCTA | 1524 | TAGCCTTTAAAGCTCGAGG |
| 1525 | CTCGAGCTTTAAAGGCTAT | 1526 | ATAGCCTTTAAAGCTCGAG |
| 1527 | TCGAGCTTTAAAGGCTATA | 1528 | TATAGCCTTTAAAGCTCGA |
| 1529 | CGAGCTTTAAAGGCTATAT | 1530 | ATATAGCCTTTAAAGCTCG |
| 1531 | GAGCTTTAAAGGCTATATA | 1532 | TATATAGCCTTTAAAGCTC |
| 1533 | AGCTTTAAAGGCTATATAG | 1534 | CTATATAGCCTTTAAAGCT |
| 1535 | GCTTTAAAGGCTATATAGA | 1536 | TCTATATAGCCTTTAAAGC |
| 1537 | CTTTAAAGGCTATATAGAA | 1538 | TTCTATATAGCCTTTAAAG |
| 1539 | TTTAAAGGCTATATAGAAA | 1540 | TTTCTATATAGCCTTTAAA |
| 1541 | TTAANGGCTATATAGAAAA | 1542 | TTTTCTATATAGCCTTTAA |
| 1543 | TAAAGGCTATATAGAAAAC | 1544 | GTTTTCTATATAGCCTTTA |
| 1545 | AAAGGCTATATAGAAAACT | 1546 | AGTTTTCTATATAGCCTTT |
| 1547 | AAGGCTATATAGAAAACTG | 1548 | CAGTTTTCTATATAGCCTT |
| 1549 | AGGCTATATAGAAAACTGT | 1550 | ACAGTTTTCTATATAGCCT |
| 1551 | GGCTATATAGAAAACTGTT | 1552 | AACAGTTTTCTATATAGCC |
| 1553 | GCTATATAGAAAACTGTTC | 1554 | GAACAGTTTTCTATATAGC |
| 1555 | CTATATAGAAAACTGTTCA | 1556 | TGAACAGTTTTCTATATAG |
| 1557 | TATATAGAAAACTGTTCAA | 1558 | TTGAACAGTTTTCTATATA |
| 1559 | ATATAGAAAACTGTTCAAC | 1560 | GTTGAACAGTTTTCTATAT |
| 1561 | TATAGAAAACTGTTCAACT | 1562 | AGTTGAACAGTTTTCTATA |
| 1563 | ATAGAAAACTGTTCAACTC | 1564 | GAGTTGAACAGTTTTCTAT |
| 1565 | TAGAAAACTGTTCAACTCC | 1566 | GGAGTTGAACAGTTTTCTA |
| 1567 | AGAAAACTGTTCAACTCCA | 1568 | TGGAGTTGAACAGTTTTCT |
| 1569 | GAAAACTGTTCAACTCCAA | 1570 | TTGGAGTTGAACAGTTTTC |
| 1571 | AAAACTGTTCAACTCCAAA | 1572 | TTTGGAGTTGAACAGTTTT |
| 1573 | AAACTGTTCAACTCCAAAT | 1574 | ATTTGGAGTTGAACAGTTT |
| 1575 | AACTGTTCAACTCCAAATA | 1576 | TATTTGGAGTTGAACAGTT |
| 1577 | ACTGTTCAACTCCAAATAC | 1578 | GTATTTGGAGTTGAACAGT |
| 1579 | CTGTTCAACTCCAAATACG | 1580 | CGTATTTGGAGTTGAACAG |
| 1581 | TGTTCAACTCCAAATACGT | 1582 | ACGTATTTGGAGTTGAACA |
| 1583 | GTTCAACTCCAAATACGTA | 1584 | TACGTATTTGGAGTTGAAC |
| 1585 | TTCAACTCCAAATACGTAC | 1586 | GTACGTATTTGGAGTTGAA |
| 1587 | TCAACTCCAAATACGTACA | 1588 | TGTACGTATTTGGAGTTGA |
| 1589 | CAACTCCAAATACGTACAT | 1590 | ATGTACGTATTTGGAGTTG |
| 1591 | AACTCCAAATACGTACATC | 1592 | GATGTACGTATTTGGAGTT |
| 1593 | ACTCCAAATACGTACATCT | 1594 | AGATGTACGTATTTGGAGT |
| 1595 | CTCCAAATACGTACATCTG | 1596 | CAGATGTACGTATTTGGAG |
| 1597 | TCCAAATACGTACATCTGC | 1598 | GCAGATGTACGTATTTGGA |
| 1599 | CCAAATACGTACATCTGCA | 1600 | TGCAGATGTACGTATTTGG |
| 1601 | CAAATACGTACATCTGCAT | 1602 | ATGCAGATGTACGTATTTG |
| 1603 | AAATACGTACATCTGCATG | 1604 | CATGCAGATGTACGTATTT |
| 1605 | AATACGTACATCTGCATGC | 1606 | GCATGCAGATGTACGTATT |
| 1607 | ATACGTACATCTGCATGCA | 1608 | TGCATGCAGATGTACGTAT |
| 1609 | TACGTACATCTGCATGCAA | 1610 | TTGCATGCAGATGTACGTA |
| 1611 | ACGTACATCTGCATGCAAA | 1612 | TTTGCATGCAGATGTACGT |
| 1613 | CGTACATCTGCATGCAAAG | 1614 | CTTTGCATGCAGATGTACG |
| 1615 | GTACATCTGCATGCAAAGG | 1616 | CCTTTGCATGCAGATGTAC |
| 1617 | TACATCTGCATGCAAAGGA | 1618 | TCCTTTGCATGCAGATGTA |
| 1619 | ACATCTGCATGCAAAGGAC | 1620 | GTCCTTTGCATGCAGATGT |
| 1621 | CATCTGCATGCAAAGGACT | 1622 | AGTCCTTTGCATGCAGATG |
| 1623 | ATCTGCATGCAAAGGACTG | 1624 | CAGTCCTTTGCATGCAGAT |
| 1625 | TCTGCATGCAAAGGACTGT | 1626 | ACAGTCCTTTGCATGCAGA |
| 1627 | CTGCATGCAAAGGACTGTG | 1628 | CACAGTCCTTTGCATGCAG |
| 1629 | TGCATGCAAAGGACTGTGT | 1630 | ACACAGTCCTTTGCATGCA |
| 1631 | GCATGCAAAGGACTGTGTA | 1632 | TACACAGTCCTTTGCATGC |
| 1633 | CATGCAAAGGACTGTGTAA | 1634 | TTACACAGTCCTTTGCATG |
| 1635 | ATGCAAAGGACTGTGTAAA | 1636 | TTTACACAGTCCTTTGCAT |
| 1637 | TGCAAAGGACTGTGTAAAG | 1638 | CTTTACACAGTCCTTTGCA |
| 1639 | GCAAAGGACTGTGTAAAGA | 1640 | TCTTTACACAGTCCTTTGC |
| 1641 | CAAAGGACTGTGTAAAGAT | 1642 | ATCTTTACACAGTCCTTTG |
| 1643 | AAAGGACTGTGTAAAGATG | 1644 | CATCTTTACACAGTCCTTT |
| 1645 | AAGGACTGTGTAAAGATGA | 1646 | TCATCTTTACACAGTCCTT |
| 1647 | AGGACTGTGTAAAGATGAT | 1648 | ATCATCTTTACACAGTCCT |
| 1649 | GGACTGTGTAAAGATGATC | 1650 | GATCATCTTTACACAGTCC |
| 1651 | GACTGTGTAAAGATGATCA | 1652 | TGATCATCTTTACACAGTC |
| 1653 | ACTGTGTAAAGATGATCAA | 1654 | TTGATCATCTTTACACAGT |
| 1655 | CTGTGTAAAGATGATCAAC | 1656 | GTTGATCATCTTTACACAG |
| 1657 | TGTGTAAAGATGATCAACC | 1658 | GGTTGATCATCTTTACACA |
| 1659 | GTGTAAAGATGATCAACCA | 1660 | TGGTTGATCATCTTTACAC |
| 1661 | TGTAAAGATGATCAACCAT | 1662 | ATGGTTGATCATCTTTACA |
| 1663 | GTAAAGATGATCAACCATC | 1664 | GATGGTTGATCATCTTTAC |
| 1665 | TAAAGATGATCAACCATCT | 1666 | AGATGGTTGATCATCTTTA |
| 1667 | AAAGATGATCAACCATCTC | 1668 | GAGATGGTTGATCATCTTT |
| 1669 | AAGATGATCAACCATCTCA | 1670 | TGAGATGGTTGATCATCTT |
| 1671 | AGATGATCAACCATCTCAA | 1672 | TTGAGATGGTTGATCATCT |
| 1673 | GATGATCAACCATCTCAAT | 1674 | ATTGAGATGGTTGATCATC |
| 1675 | ATGATCAACCATCTCAATA | 1676 | TATTGAGATGGTTGATCAT |
| 1677 | TGATCAACCATCTCAATAA | 1678 | TTATTGAGATGGTTGATCA |
| 1679 | GATCAACCATCTCAATAAA | 1680 | TTTATTGAGATGGTTGATC |
| 1681 | ATCAACCATCTCAATAAAA | 1682 | TTTTATTGAGATGGTTGAT |
| 1683 | TCAACCATCTCAATAAAAG | 1684 | CTTTTATTGAGATGGTTGA |
| 1685 | CAACCATCTCAATAAAAGC | 1686 | GCTTTTATTGAGATGGTTG |
| 1687 | AACCATCTCAATAAAAGCC | 1688 | GGCTTTTATTGAGATGGTT |
| 1689 | ACCATCTCAATAAAAGCCA | 1690 | TGGCTTTTATTGAGATGGT |
| 1691 | CCATCTCAATAAAAGCCAG | 1692 | CTGGCTTTTATTGAGATGG |
| 1693 | CATCTCAATAAAAGCCAGG | 1694 | CCTGGCTTTTATTGAGATG |
| 1695 | ATCTCAATAAAAGCCAGGA | 1696 | TCCTGGCTTTTATTGAGAT |
| 1697 | TCTCAATAAAAGCCAGGAA | 1698 | TTCCTGGCTTTTATTGAGA |
| 1699 | CTCAATAAAAGCCAGGAAC | 1700 | GTTCCTGGCTTTTATTGAG |
| 1701 | TCAATAAAAGCCAGGAACA | 1702 | TGTTCCTGGCTTTTATTGA |
| 1703 | CAATAAAAGCCAGGAACAG | 1704 | CTGTTCCTGGCTTTTATTG |
| 1705 | AATAAAAGCCAGGAACAGA | 1706 | TCTGTTCCTGGCTTTTATT |
| 1707 | ATAAAAGCCAGGAACAGAG | 1708 | CTCTGTTCCTGGCTTTTAT |
| 1709 | TAAAAGCCAGGAACAGAGA | 1710 | TCTCTGTTCCTGGCTTTTA |
| 1711 | AAAAGCCAGGAACAGAGAA | 1712 | TTCTCTGTTCCTGGCTTTT |
| 1713 | AAAGCCAGGAACAGAGAAG | 1714 | CTTCTCTGTTCCTGGCTTT |
| 1715 | AAGCCAGGAACAGAGAAGA | 1716 | TCTTCTCTGTTCCTGGCTT |
| 1717 | AGCCAGGAACAGAGAAGAG | 1718 | CTCTTCTCTGTTCCTGGCT |
| 1719 | GCCAGGAACAGAGAAGAGA | 1720 | TCTCTTCTCTGTTCCTGGC |
| 1721 | CCAGGAACAGAGAAGAGAT | 1722 | ATCTCTTCTCTGTTCCTGG |
| 1723 | CAGGAACAGAGAAGAGATT | 1724 | AATCTCTTCTCTGTTCCTG |
| 1725 | AGGAACAGAGAAGAGATTA | 1726 | TAATCTCTTCTCTGTTCCT |
| 1727 | GGAACAGAGAAGAGATTAC | 1728 | GTAATCTCTTCTCTGTTCC |
| 1729 | GAACAGAGAAGAGATTACA | 1730 | TGTAATCTCTTCTCTGTTC |
| 1731 | AACAGAGAAGAGATTACAC | 1732 | GTGTAATCTCTTCTCTGTT |
| 1733 | ACAGAGAAGAGATTACACC | 1734 | GGTGTAATCTCTTCTCTGT |
| 1735 | CAGAGAAGAGATTACACCA | 1736 | TGGTGTAATCTCTTCTCTG |
| 1737 | AGAGAAGAGATTACACCAG | 1738 | CTGGTGTAATCTCTTCTCT |
| 1739 | GAGAAGAGATTACACCAGC | 1740 | GCTGGTGTAATCTCTTCTC |
| 1741 | AGAAGAGATTACACCAGCG | 1742 | CGCTGGTGTAATCTCTTCT |
| 1743 | GAAGAGATTACACCAGCGG | 1744 | CCGCTGGTGTAATCTCTTC |
| 1745 | AAGAGATTACACCAGCGGT | 1746 | ACCGCTGGTGTAATCTCTT |
| 1747 | AGAGATTACACCAGCGGTA | 1748 | TACCGCTGGTGTAATCTCT |
| 1749 | GAGATTACACCAGCGGTAA | 1750 | TTACCGCTGGTGTAATCTC |
| 1751 | AGATTACACCAGCGGTAAC | 1752 | GTTACCGCTGGTGTAATCT |
| 1753 | GATTACACCAGCGGTAACA | 1754 | TGTTACCGCTGGTGTAATC |
| 1755 | ATTACACCAGCGGTAACAC | 1756 | GTGTTACCGCTGGTGTAAT |
| 1757 | TTACACCAGCGGTAACACT | 1758 | AGTGTTACCGCTGGTGTAA |
| 1759 | TACACCAGCGGTAACACTG | 1760 | CAGTGTTACCGCTGGTGTA |
| 1761 | ACACCAGCGGTAACACTGC | 1762 | GCAGTGTTACCGCTGGTGT |
| 1763 | CACCAGCGGTAACACTGCC | 1764 | GGCAGTGTTACCGCTGGTG |
| 1765 | ACCAGCGGTAACACTGCCA | 1766 | TGGCAGTGTTACCGCTGGT |
| 1767 | CCAGCGGTAACACTGCCAA | 1768 | TTGGCAGTGTTACCGCTGG |
| 1769 | CAGCGGTAACACTGCCAAC | 1770 | GTTGGCAGTGTTACCGCTG |
| 1771 | AGCGGTAACACTGCCAACT | 1772 | AGTTGGCAGTGTTACCGCT |
| 1773 | GCGGTAACACTGCCAACTG | 1774 | CAGTTGGCAGTGTTACCGC |
| 1775 | CGGTAACACTGCCAACTGA | 1776 | TCAGTTGGCAGTGTTACCG |
| 1777 | GGTAACACTGCCAACTGAG | 1778 | CTCAGTTGGCAGTGTTACC |
| 1779 | GTAACACTGCCAACTGAGA | 1780 | TCTCAGTTGGCAGTGTTAC |
| 1781 | TAACACTGCCAACTGAGAC | 1782 | GTCTCAGTTGGCAGTGTTA |
| 1783 | AACACTGCCAACTGAGACT | 1784 | AGTCTCAGTTGGCAGTGTT |
| 1785 | ACACTGCCAACTGAGACTA | 1786 | TAGTCTCAGTTGGCAGTGT |
| 1787 | CACTGCCAACTGAGACTAA | 1788 | TTAGTCTCAGTTGGCAGTG |
| 1789 | ACTGCCAACTGAGACTAAA | 1790 | TTTAGTCTCAGTTGGCAGT |
| 1791 | CTGCCAACTGAGACTAAAG | 1792 | CTTTAGTCTCAGTTGGCAG |
| 1793 | TGCCAACTGAGACTAAAGG | 1794 | CCTTTAGTCTCAGTTGGCA |
| 1795 | GCCAACTGAGACTAAAGGA | 1796 | TCCTTTAGTCTCAGTTGGC |
| 1797 | CCAACTGAGACTAAAGGAA | 1798 | TTCCTTTAGTCTCAGTTGG |
| 1799 | CAACTGAGACTAAAGGAAA | 1800 | TTTCCTTTAGTCTCAGTTG |
| 1801 | AACTGAGACTAAAGGAAAC | 1802 | GTTTCCTTTAGTCTCAGTT |
| 1803 | ACTGAGACTAAAGGAAACA | 1804 | TGTTTCCTTTAGTCTCAGT |
| 1805 | CTGAGACTAAAGGAAACAA | 1806 | TTGTTTCCTTTAGTCTCAG |
| 1807 | TGAGACTAAAGGAAACAAA | 1808 | TTTGTTTCCTTTAGTCTCA |
| 1809 | GAGACTAAAGGAAACAAAC | 1810 | GTTTGTTTCCTTTAGTCTC |
| 1811 | AGACTAAAGGAAACAAACA | 1812 | TGTTTGTTTCCTTTAGTCT |
| 1813 | GACTAAAGGAAACAAACAA | 1814 | TTGTTTGTTTCCTTTAGTC |
| 1815 | ACTAAAGGAAACAAACAAA | 1816 | TTTGTTTGTTTCCTTTAGT |
| 1817 | CTAAAGGAAACAAACAAAA | 1818 | TTTTGTTTGTTTCCTTTAG |
| 1819 | TAAAGGAAACAAACAAAAA | 1820 | TTTTTGTTTGTTTCCTTTA |
| 1821 | AAAGGAAACAAACAAAAAC | 1822 | GTTTTTGTTTGTTTCCTTT |
| 1823 | AAGGAAACAAACAAAAACA | 1824 | TGTTTTTGTTTGTTTCCTT |
| 1825 | AGGAAACAAACAAAAACAG | 1826 | CTGTTTTTGTTTGTTTCCT |
| 1827 | GGAAACAAACAAAAACAGG | 1828 | CCTGTTTTTGTTTGTTTCC |
| 1829 | GAAACAAACAAAAACAGGA | 1830 | TCCTGTTTTTGTTTGTTTC |
| 1831 | AAACAAACAAAAACAGGAC | 1832 | GICCTGITITTGTTTGTTT |
| 1833 | AACAAACAAAAACAGGACA | 1834 | TGTCCTGTTTTTGTTTGTT |
| 1835 | ACAAACAAAAACAGGACAA | 1836 | TTGTCCTGTTTTTGTTTGT |
| 1837 | CAAACAAAAACAGGACAAA | 1838 | TTTGTCCTGTTTTTGTTTG |
| 1839 | AAACAAAAACAGGACAAAA | 1840 | TTTTGTCCTGTTTTTGTTT |
| 1841 | AACAAAAACAGGACAAAAT | 1842 | ATTTTGTCCTGTTTTTGTT |
| 1843 | ACAAAAACAGGACAAAATG | 1844 | CATTTTGTCCTGTTTTTGT |
| 1845 | CAAAAACAGGACAAAATGA | 1846 | TCATTTTGTCCTGTTTTTG |
| 1847 | AAAAACAGGACAAAATGAC | 1848 | GTCATTTTGTCCTGTTTTT |
| 1849 | AAAACAGGACAAAATGACC | 1850 | GGTCATTTTGTCCTGTTTT |
| 1851 | AAACAGGACAAAATGACCA | 1852 | TGGTCATTTTGTCCTGTTT |
| 1853 | AACAGGACAAAATGACCAA | 1854 | TTGGTCATTTTGTCCTGTT |
| 1855 | ACAGGACAAAATGACCAAA | 1856 | TTTGGTCATTTTGTCCTGT |
| 1857 | CAGGACAAAATGACCAAAG | 1858 | CTTTGGTCATTTTGTCCTG |
| 1859 | AGGACAAAATGACCAAAGA | 1860 | TCTTTGGTCATTTTGTCCT |
| 1861 | GGACAAAATGACCAAAGAC | 1862 | GTCTTTGGTCATTTTGTCC |
| 1863 | GACAAAATGACCAAAGACT | 1864 | AGTCTTTGGTCATTTTGTC |
| 1865 | ACAAAATGACCAAAGACTG | 1866 | CAGTCTTTGGTCATTTTGT |
| 1867 | CAAAATGACCAAAGACTGT | 1868 | ACAGTCTTTGGTCATTTTG |
| 1869 | AAAATGACCAAAGACTGTC | 1870 | GACAGTCTTTGGTCATTTT |
| 1871 | AAATGACCAAAGACTGTCA | 1872 | TGACAGTCTTTGGTCATTT |
| 1873 | AATGACCAAAGACTGTCAG | 1874 | CTGACAGTCTTTGGTCATT |
| 1875 | ATGACCAAAGACTGTCAGA | 1876 | TCTGACAGTCTTTGGTCAT |
| 1877 | TGACCAAAGACTGTCAGAT | 1878 | ATCTGACAGTCTTTGGTCA |
| 1879 | GACCAAAGACTGTCAGATT | 1880 | AATCTGACAGTCTTTGGTC |
| 1881 | ACCAAAGACTGTCAGATTT | 1882 | AAATCTGACAGTCTTTGGT |
| 1883 | CCAAAGACTGTCAGATTTC | 1884 | GAAATCTGACAGTCTTTGG |
| 1885 | CAAAGACTGTCAGATTTCT | 1886 | AGAAATCTGACAGTCTTTG |
| 1887 | AAAGACTGTCAGATTTCTT | 1888 | AAGAAATCTGACAGTCTTT |
| 1889 | AAGACTGTCAGATTTCTTA | 1890 | TAAGAAATCTGACAGTCTT |
| 1891 | AGACTGTCAGATTTCTTAG | 1892 | CTAAGAAATCTGACAGTCT |
| 1893 | GACTGTCAGATTTCTTAGA | 1894 | TCTAAGAAATCTGACAGTC |
| 1895 | ACTGTCAGATTTCTTAGAC | 1896 | GTCTAAGAAATCTGACAGT |
| 1897 | CTGTCAGATTTCTTAGACT | 1898 | AGTCTAAGAAATCTGACAG |
| 1899 | TGTCAGATTTCTTAGACTC | 1900 | GAGTCTAAGAAATCTGACA |
| 1901 | GTCAGATTTCTTAGACTCC | 1902 | GGAGTCTAAGAAATCTGAC |
| 1903 | TCAGATTTCTTAGACTCCA | 1904 | TGGAGTCTAAGAAATCTGA |
| 1905 | CAGATTTCTTAGACTCCAC | 1906 | GTGGAGTCTAAGAAATCTG |
| 1907 | AGATTTCTTAGACTCCACA | 1908 | TGTGGAGTCTAAGAAATCT |
| 1909 | GATTTCTTAGACTCCACAG | 1910 | CTGTGGAGTCTAAGAAATC |
| 1911 | ATTTCTTAGACTCCACAGG | 1912 | CCTGTGGAGTCTAAGAAAT |
| 1913 | TTTCTTAGACTCCACAGGA | 1914 | TCCTGTGGAGTCTAAGAAA |
| 1915 | TTCTTAGACTCCACAGGAC | 1916 | GTCCTGTGGAGTCTAAGAA |
| 1917 | TCTTAGACTCCACAGGACC | 1918 | GGTCCTGTGGAGTCTAAGA |
| 1919 | CTTAGACTCCACAGGACCA | 1920 | TGGTCCTGTGGAGTCTAAG |
| 1921 | TTAGACTCCACAGGACCAA | 1922 | TTGGTCCTGTGGAGTCTAA |
| 1923 | TAGACTCCACAGGACCAAA | 1924 | TTTGGTCCTGTGGAGTCTA |
| 1925 | AGACTCCACAGGACCAAAC | 1926 | GTTTGGTCCTGTGGAGTCT |
| 1927 | GACTCCACAGGACCAAACC | 1928 | GGTTTGGTCCTGTGGAGTC |
| 1929 | ACTCCACAGGACCAAACCA | 1930 | TGGTTTGGTCCTGTGGAGT |
| 1931 | CTCCACAGGACCAAACCAT | 1932 | ATGGTTTGGTCCTGTGGAG |
| 1933 | TCCACAGGACCAAACCATA | 1934 | TATGGTTTGGTCCTGTGGA |
| 1935 | CCACAGGACCAAACCATAG | 1936 | CTATGGTTTGGTCCTGTGG |
| 1937 | CACAGGACCAAACCATAGA | 1938 | TCTATGGTTTGGTCCTGTG |
| 1939 | ACAGGACCAAACCATAGAA | 1940 | TTCTATGGTTTGGTCCTGT |
| 1941 | CAGGACCAAACCATAGAAC | 1942 | GTTCTATGGTTTGGTCCTG |
| 1943 | AGGACCAAACCATAGAACA | 1944 | TGTTCTATGGTTTGGTCCT |
| 1945 | GGACCAAACCATAGAACAA | 1946 | TTGTTCTATGGTTTGGTCC |
| 1947 | GACCAAACCATAGAACAAT | 1948 | ATTGTTCTATGGTTTGGTC |
| 1949 | ACCAAACCATAGAACAATT | 1950 | AATTGTTCTATGGTTTGGT |
| 1951 | CCAAACCATAGAACAATTT | 1952 | AAATTGTTCTATGGTTTGG |
| 1953 | CAAACCATAGAACAATTTC | 1954 | GAAATTGTTCTATGGTTTG |
| 1955 | AAACCATAGAACAATTTCA | 1956 | TGAAATTGTTCTATGGTTT |
| 1957 | AACCATAGAACAATTTCAC | 1958 | GTGAAATTGTTCTATGGTT |
| 1959 | ACCATAGAACAATTTCACT | 1960 | AGTGAAATTGTTCTATGGT |
| 1961 | CCATAGAACAATTTCACTG | 1962 | CAGTGAAATTGTTCTATGG |
| 1963 | CATAGAACAATTTCACTGC | 1964 | GCAGTGAAATTGTTCTATG |
| 1965 | ATAGAACAATTTCACTGCA | 1966 | TGCAGTGAAATTGTTCTAT |
| 1967 | TAGAACAATTTCACTGCAA | 1968 | TTGCAGTGAAATTGTTCTA |
| 1969 | AGAACAATTTCACTGCAAA | 1970 | TTTGCAGTGAAATTGTTCT |
| 1971 | GAACAATTTCACTGCAAAC | 1972 | GTTTGCAGTGAAATTGTTC |
| 1973 | AACAATTTCACTGCAAACA | 1974 | TGTTTGCAGTGAAATTGTT |
| 1975 | ACAATTTCACTGCAAACAT | 1976 | ATGTTTGCAGTGAAATTGT |
| 1977 | CAATTTCACTGCAAACATG | 1978 | CATGTTTGCAGTGAAATTG |
| 1979 | AATTTCACTGCAAACATGC | 1980 | GCATGTTTGCAGTGAAATT |
| 1981 | ATTTCACTGCAAACATGCA | 1982 | TGCATGTTTGCAGTGAAAT |
| 1983 | TTTCACTGCAAACATGCAT | 1984 | ATGCATGTTTGCAGTGAAA |
| 1985 | TTCACTGCAAACATGCATG | 1986 | CATGCATGTTTGCAGTGAA |
| 1987 | TCACTGCAAACATGCATGA | 1988 | TCATGCATGTTTGCAGTGA |
| 1989 | CACTGCAAACATGCATGAT | 1990 | ATCATGCATGTTTGCAGTG |
| 1991 | ACTGCAAACATGCATGATT | 1992 | AATCATGCATGTTTGCAGT |
| 1993 | CTGCAAACATGCATGATTC | 1994 | GAATCATGCATGTTTGCAG |
| 1995 | TGCAAACATGCATGATTCT | 1996 | AGAATCATGCATGTTTGCA |
| 1997 | GCAAACATGCATGATTCTC | 1998 | GAGAATCATGCATGTTTGC |
| 1999 | CAAACATGCATGATTCTCC | 2000 | GGAGAATCATGCATGTTTG |
| 2001 | AAACATGCATGATTCTCCA | 2002 | TGGAGAATCATGCATGTTT |
| 2003 | AACATGCATGATTCTCCAA | 2004 | TTGGAGAATCATGCATGTT |
| 2005 | ACATGCATGATTCTCCAAG | 2006 | CTTGGAGAATCATGCATGT |
| 2007 | CATGCATGATTCTCCAAGA | 2008 | TCTTGGAGAATCATGCATG |
| 2009 | ATGCATGATTCTCCAAGAC | 2010 | GTCTTGGAGAATCATGCAT |
| 2011 | TGCATGATTCTCCAAGACA | 2012 | TGTCTTGGAGAATCATGCA |
| 2013 | GCATGATTCTCCAAGACAA | 2014 | TTGTCTTGGAGAATCATGC |
| 2015 | CATGATTCTCCAAGACAAA | 2016 | TTTGTCTTGGAGAATCATG |
| 2017 | ATGATTCTCCAAGACAAAA | 2018 | TTTTGTCTTGGAGAATCAT |
| 2019 | TGATTCTCCAAGACAAAAG | 2020 | CTTTTGTCTTGGAGAATCA |
| 2021 | GATTCTCCAAGACAAAAGA | 2022 | TCTTTTGTCTTGGAGAATC |
| 2023 | ATTCTCCAAGACAAAAGAA | 2024 | TTCTTTTGTCTTGGAGAAT |
| 2025 | TTCTCCAAGACAAAAGAAG | 2026 | CTTCTTTTGTCTTGGAGAA |
| 2027 | TCTCCAAGACAAAAGAAGA | 2028 | TCTTCTTTTGTCTTGGAGA |
| 2029 | CTCCAAGACAAAAGAAGAG | 2030 | CTCTTCTTTTGTCTTGGAG |
| 2031 | TCCAAGACAAAAGAAGAGA | 2032 | TCTCTTCTTTTGTCTTGGA |
| 2033 | CCAAGACAAAAGAAGAGAG | 2034 | CTCTCTTCTTTTGTCTTGG |
| 2035 | CAAGACAAAAGAAGAGAGA | 2036 | TCTCTCTTCTTTTGTCTTG |
| 2037 | AAGACAAAAGAAGAGAGAT | 2038 | ATCTCTCTTCTTTTGTCTT |
| 2039 | AGACAAAAGAAGAGAGATC | 2040 | GATCTCTCTTCTTTTGTCT |
| 2041 | GACAAAAGAAGAGAGATCC | 2042 | GGATCTCTCTTCTTTTGTC |
| 2043 | ACAAAAGAAGAGAGATCCT | 2044 | AGGATCTCTCTTCTTTTGT |
| 2045 | CAAAAGAAGAGAGATCCTA | 2046 | TAGGATCTCTCTTCTTTTG |
| 2047 | AAAAGAAGAGAGATCCTAA | 2048 | TTAGGATCTCTCTTCTTTT |
| 2049 | AAAGAAGAGAGATCCTAAA | 2050 | TTTAGGATCTCTCTTCTTT |
| 2051 | AAGAAGAGAGATCCTAAAG | 2052 | CTTTAGGATCTCTCTTCTT |
| 2053 | AGAAGAGAGATCCTAAAGG | 2054 | CCTTTAGGATCTCTCTTCT |
| 2055 | GAAGAGAGATCCTAAAGGC | 2056 | GCCTTTAGGATCTCTCTTC |
| 2057 | AAGAGAGATCCTAAAGGCA | 2058 | TGCCTTTAGGATCTCTCTT |
| 2059 | AGAGAGATCCTAAAGGCAA | 2060 | TTGCCTTTAGGATCTCTCT |
| 2061 | GAGAGATCCTAAAGGCAAT | 2062 | ATTGCCTTTAGGATCTCTC |
| 2063 | AGAGATCCTAAAGGCAATT | 2064 | AATTGCCTTTAGGATCTCT |
| 2065 | GAGATCCTAAAGGCAATTC | 2066 | GAATTGCCTTTAGGATCTC |
| 2067 | AGATCCTAAAGGCAATTCA | 2068 | TGAATTGCCTTTAGGATCT |
| 2069 | GATCCTAAAGGCAATTCAG | 2070 | CTGAATTGCCTTTAGGATC |
| 2071 | ATCCTAAAGGCAATTCAGA | 2072 | TCTGAATTGCCTTTAGGAT |
| 2073 | TCCTAAAGGCAATTCAGAT | 2074 | ATCTGAATTGCCTTTAGGA |
| 2075 | CCTAAAGGCAATTCAGATA | 2076 | TATCTGAATTGCCTTTAGG |
| 2077 | CTAAAGGCAATTCAGATAT | 2078 | ATATCTGAATTGCCTTTAG |
| 2079 | TAAAGGCAATTCAGATATC | 2080 | GATATCTGAATTGCCTTTA |
| 2081 | AAAGGCAATTCAGATATCC | 2082 | GGATATCTGAATTGCCTTT |
| 2083 | AAGGCAATTCAGATATCCC | 2084 | GGGATATCTGAATTGCCTT |
| 2085 | AGGCAATTCAGATATCCCC | 2086 | GGGGATATCTGAATTGCCT |
| 2087 | GGCAATTCAGATATCCCCA | 2088 | TGGGGATATCTGAATTGCC |
| 2089 | GCAATTCAGATATCCCCAA | 2090 | TTGGGGATATCTGAATTGC |
| 2091 | CAATTCAGATATCCCCAAG | 2092 | CTTGGGGATATCTGAATTG |
| 2093 | AATTCAGATATCCCCAAGG | 2094 | CCTTGGGGATATCTGAATT |
| 2095 | ATTCAGATATCCCCAAGGC | 2096 | GCCTTGGGGATATCTGAAT |
| 2097 | TTCAGATATCCCCAAGGCT | 2098 | AGCCTTGGGGATATCTGAA |
| 2099 | TCAGATATCCCCAAGGCTG | 2100 | CAGCCTTGGGGATATCTGA |
| 2101 | CAGATATCCCCAAGGCTGC | 2102 | GCAGCCTTGGGGATATCTG |
| 2103 | AGATATCCCCAAGGCTGCC | 2104 | GGCAGCCTTGGGGATATCT |
| 2105 | GATATCCCCAAGGCTGCCT | 2106 | AGGCAGCCTTGGGGATATC |
| 2107 | ATATCCCCAAGGCTGCCTC | 2108 | GAGGCAGCCTTGGGGATAT |
| 2109 | TATCCCCAAGGCTGCCTCT | 2110 | AGAGGCAGCCTTGGGGATA |
| 2111 | ATCCCCAAGGCTGCCTCTC | 2112 | GAGAGGCAGCCTTGGGGAT |
| 2113 | TCCCCAAGGCTGCCTCTCC | 2114 | GGAGAGGCAGCCTTGGGGA |
| 2115 | CCCCAAGGCTGCCTCTCCC | 2116 | GGGAGAGGCAGCCTTGGGG |
| 2117 | CCCAAGGCTGCCTCTCCCA | 2118 | TGGGAGAGGCAGCCTTGGG |
| 2119 | CCAAGGCTGCCTCTCCCAC | 2120 | GTGGGAGAGGCAGCCTTGG |
| 2121 | CAAGGCTGCCTCTCCCACC | 2122 | GGTGGGAGAGGCAGCCTTG |
| 2123 | AAGGCTGCCTCTCCCACCA | 2124 | TGGTGGGAGAGGCAGCCTT |
| 2125 | AGGCTGCCTCTCCCACCAC | 2126 | GTGGTGGGAGAGGCAGCCT |
| 2127 | GGCTGCCTCTCCCACCACA | 2128 | TGTGGTGGGAGAGGCAGCC |
| 2129 | GCTGCCTCTCCCACCACAA | 2130 | TTGTGGTGGGAGAGGCAGC |
| 2131 | CTGCCTCTCCCACCACAAG | 2132 | CTTGTGGTGGGAGAGGCAG |
| 2133 | TGCCTCTCCCACCACAAGC | 2134 | GCTTGTGGTGGGAGAGGCA |
| 2135 | GCCTCTCCCACCACAAGCC | 2136 | GGCTTGTGGTGGGAGAGGC |
| 2137 | CCTCTCCCACCACAAGCCC | 2138 | GGGCTTGTGGTGGGAGAGG |
| 2139 | CTCTCCCACCACAAGCCCA | 2140 | TGGGCTTGTGGTGGGAGAG |
| 2141 | TCTCCCACCACAAGCCCAG | 2142 | CTGGGCTTGTGGTGGGAGA |
| 2143 | CTCCCACCACAAGCCCAGA | 2144 | TCTGGGCTTGTGGTGGGAG |
| 2145 | TCCCACCACAAGCCCAGAG | 2146 | CTCTGGGCTTGTGGTGGGA |
| 2147 | CCCACCACAAGCCCAGAGT | 2148 | ACTCTGGGCTTGTGGTGGG |
| 2149 | CCACCACAAGCCCAGAGTG | 2150 | CACTCTGGGCTTGTGGTGG |
| 2151 | CACCACAAGCCCAGAGTGG | 2152 | CCACTCTGGGCTTGTGGTG |
| 2153 | ACCACAAGCCCAGAGTGGA | 2154 | TCCACTCTGGGCTTGTGGT |
| 2155 | CCACAAGCCCAGAGTGGAT | 2156 | ATCCACTCTGGGCTTGTGG |
| 2157 | CACAAGCCCAGAGTGGATG | 2158 | CATCCACTCTGGGCTTGTG |
| 2159 | ACAAGCCCAGAGTGGATGG | 2160 | CCATCCACTCTGGGCTTGT |
| 2161 | CAAGCCCAGAGTGGATGGG | 2162 | CCCATCCACTCTGGGCTTG |
| 2163 | AAGCCCAGAGTGGATGGGC | 2164 | GCCCATCCACTCTGGGCTT |
| 2165 | AGCCCAGAGTGGATGGGCT | 2166 | AGCCCATCCACTCTGGGCT |
| 2167 | GCCCAGAGTGGATGGGCTG | 2168 | CAGCCCATCCACTCTGGGC |
| 2169 | CCCAGAGTGGATGGGCTGG | 2170 | CCAGCCCATCCACTCTGGG |
| 2171 | CCAGAGTGGATGGGCTGGG | 2172 | CCCAGCCCATCCACTCTGG |
| 2173 | CAGAGTGGATGGGCTGGGG | 2174 | CCCCAGCCCATCCACTCTG |
| 2175 | AGAGTGGATGGGCTGGGGG | 2176 | CCCCCAGCCCATCCACTCT |
| 2177 | GAGTGGATGGGCTGGGGGA | 2178 | TCCCCCAGCCCATCCACTC |
| 2179 | AGTGGATGGGCTGGGGGAG | 2180 | CTCCCCCAGCCCATCCACT |
| 2181 | GTGGATGGGCTGGGGGAGG | 2182 | CCTCCCCCAGCCCATCCAC |
| 2183 | TGGATGGGCTGGGGGAGGG | 2184 | CCCTCCCCCAGCCCATCCA |
| 2185 | GGATGGGCTGGGGGAGGGG | 2186 | CCCCTCCCCCAGCCCATCC |
| 2187 | GATGGGCTGGGGGAGGGGT | 2188 | ACCCCTCCCCCAGCCCATC |
| 2189 | ATGGGCTGGGGGAGGGGTG | 2190 | CACCCCTCCCCCAGCCCAT |
| 2191 | TGGGCTGGGGGAGGGGTGC | 2192 | GCACCCCTCCCCCAGCCCA |
| 2193 | GGGCTGGGGGAGGGGTGCT | 2194 | AGCACCCCTCCCCCAGCCC |
| 2195 | GGCTGGGGGAGGGGTGCTG | 2196 | CAGCACCCCTCCCCCAGCC |
| 2197 | GCTGGGGGAGGGGTGCTGT | 2198 | ACAGCACCCCTCCCCCAGC |
| 2199 | CTGGGGGAGGGGTGCTGTT | 2200 | AACAGCACCCCTCCCCCAG |
| 2201 | TGGGGGAGGGGTGCTGTTT | 2202 | AAACAGCACCCCTCCCCCA |
| 2203 | GGGGGAGGGGTGCTGTTTT | 2204 | AAAACAGCACCCCTCCCCC |
| 2205 | GGGGAGGGGTGCTGTTTTA | 2206 | TAAAACAGCACCCCTCCCC |
| 2207 | GGGAGGGGTGCTGTTTTAA | 2208 | TTAAAACAGCACCCCTCCC |
| 2209 | GGAGGGGTGCTGTTTTAAT | 2210 | ATTAAAACAGCACCCCTCC |
| 2211 | GAGGGGTGCTGTTTTAATT | 2212 | AATTAAAACAGCACCCCTC |
| 2213 | AGGGGTGCTGTTTTAATTT | 2214 | AAATTAAAACAGCACCCCT |
| 2215 | GGGGTGCTGTTTTAATTTC | 2216 | GAAATTAAAACAGCACCCC |
| 2217 | GGGTGCTGTTTTAATTTCT | 2218 | AGAAATTAAAACAGCACCC |
| 2219 | GGTGCTGTTTTAATTTCTA | 2220 | TAGAAATTAAAACAGCACC |
| 2221 | GTGCTGTTTTAATTTCTAA | 2222 | TTAGAAATTAAAACAGCAC |
| 2223 | TGCTGTTTTAATTTCTAAA | 2224 | TTTAGAAATTAAAACAGCA |
| 2225 | GCTGTTTTAATTTCTAAAG | 2226 | CTTTAGAAATTAAAACAGC |
| 2227 | CTGTTTTAATTTCTAAAGG | 2228 | CCTTTAGAAATTAAAACAG |
| 2229 | TGTTTTAATTTCTAAAGGT | 2230 | ACCTTTAGAAATTAAAACA |
| 2231 | GTTTTAATTTCTAAAGGTA | 2232 | TACCTTTAGAAATTAAAAC |
| 2233 | TTTTAATTTCTAAAGGTAG | 2234 | CTACCTTTAGAAATTAAAA |
| 2235 | TTTAATTTCTAAAGGTAGG | 2236 | CCTACCTTTAGAAATTAAA |
| 2237 | TTAATTTCTAAAGGTAGGA | 2238 | TCCTACCTTTAGAAATTAA |
| 2239 | TAATTTCTAAAGGTAGGAC | 2240 | GTCCTACCTTTAGAAATTA |
| 2241 | AATTTCTAAAGGTAGGACC | 2242 | GGTCCTACCTTTAGAAATT |
| 2243 | ATTTCTAAAGGTAGGACCA | 2244 | TGGTCCTACCTTTAGAAAT |
| 2245 | TTTCTAAAGGTAGGACCAA | 2246 | TTGGTCCTACCTTTAGAAA |
| 2247 | TTCTAAAGGTAGGACCAAC | 2248 | GTTGGTCCTACCTTTAGAA |
| 2249 | TCTAAAGGTAGGACCAACA | 2250 | TGTTGGTCCTACCTTTAGA |
| 2251 | CTAAAGGTAGGACCAACAC | 2252 | GTGTTGGTCCTACCTTTAG |
| 2253 | TAAAGGTAGGACCAACACC | 2254 | GGTGTTGGTCCTACCTTTA |
| 2255 | AAAGGTAGGACCAACACCC | 2256 | GGGTGTTGGTCCTACCTTT |
| 2257 | AAGGTAGGACCAACACCCA | 2258 | TGGGTGTTGGTCCTACCTT |
| 2259 | AGGTAGGACCAACACCCAG | 2260 | CTGGGTGTTGGTCCTACCT |
| 2261 | GGTAGGACCAACACCCAGG | 2262 | CCTGGGTGTTGGTCCTACC |
| 2263 | GTAGGACCAACACCCAGGG | 2264 | CCCTGGGTGTTGGTCCTAC |
| 2265 | TAGGACCAACACCCAGGGG | 2266 | CCCCTGGGTGTTGGTCCTA |
| 2267 | AGGACCAACACCCAGGGGA | 2268 | TCCCCTGGGTGTTGGTCCT |
| 2269 | GGACCAACACCCAGGGGAT | 2270 | ATCCCCTGGGTGTTGGTCC |
| 2271 | GACCAACACCCAGGGGATC | 2272 | GATCCCCTGGGTGTTGGTC |
| 2273 | ACCAACACCCAGGGGATCA | 2274 | TGATCCCCTGGGTGTTGGT |
| 2275 | CCAACACCCAGGGGATCAG | 2276 | CTGATCCCCTGGGTGTTGG |
| 2277 | CAACACCCAGGGGATCAGT | 2278 | ACTGATCCCCTGGGTGTTG |
| 2279 | AACACCCAGGGGATCAGTG | 2280 | CACTGATCCCCTGGGTGTT |
| 2281 | ACACCCAGGGGATCAGTGA | 2282 | TCACTGATCCCCTGGGTGT |
| 2283 | CACCCAGGGGATCAGTGAA | 2284 | TTCACTGATCCCCTGGGTG |
| 2285 | ACCCAGGGGATCAGTGAAG | 2286 | CTTCACTGATCCCCTGGGT |
| 2287 | CCCAGGGGATCAGTGAAGG | 2288 | CCTTCACTGATCCCCTGGG |
| 2289 | CCAGGGGATCAGTGAAGGA | 2290 | TCCTTCACTGATCCCCTGG |
| 2291 | CAGGGGATCAGTGAAGGAA | 2292 | TTCCTTCACTGATCCCCTG |
| 2293 | AGGGGATCAGTGAAGGAAG | 2294 | CTTCCTTCACTGATCCCCT |
| 2295 | GGGGATCAGTGAAGGAAGA | 2296 | TCTTCCTTCACTGATCCCC |
| 2297 | GGGATCAGTGAAGGAAGAG | 2298 | CTCTTCCTTCACTGATCCC |
| 2299 | GGATCAGTGAAGGAAGAGA | 2300 | TCTCTTCCTTCACTGATCC |
| 2301 | GATCAGTGAAGGAAGAGAA | 2302 | TTCTCTTCCTTCACTGATC |
| 2303 | ATCAGTGAAGGAAGAGAAG | 2304 | CTTCTCTTCCTTCACTGAT |
| 2305 | TCAGTGAAGGAAGAGAAGG | 2306 | CCTTCTCTTCCTTCACTGA |
| 2307 | CAGTGAAGGAAGAGAAGGC | 2308 | GCCTTCTCTTCCTTCACTG |
| 2309 | AGTGAAGGAAGAGAAGGCC | 2310 | GGCCTTCTCTTCCTTCACT |
| 2311 | GTGAAGGAAGAGAAGGCCA | 2312 | TGGCCTTCTCTTCCTTCAC |
| 2313 | TGAAGGAAGAGAAGGCCAG | 2314 | CTGGCCTTCTCTTCCTTCA |
| 2315 | GAAGGAAGAGAAGGCCAGC | 2316 | GCTGGCCTTCTCTTCCTTC |
| 2317 | AAGGAAGAGAAGGCCAGCA | 2318 | TGCTGGCCTTCTCTTCCTT |
| 2319 | AGGAAGAGAAGGCCAGCAG | 2320 | CTGCTGGCCTTCTCTTCCT |
| 2321 | GGAAGAGAAGGCCAGCAGA | 2322 | TCTGCTGGCCTTCTCTTCC |
| 2323 | GAAGAGAAGGCCAGCAGAT | 2324 | ATCTGCTGGCCTTCTCTTC |
| 2325 | AAGAGAAGGCCAGCAGATC | 2326 | GATCTGCTGGCCTTCTCTT |
| 2327 | AGAGAAGGCCAGCAGATCA | 2328 | TGATCTGCTGGCCTTCTCT |
| 2329 | GAGAAGGCCAGCAGATCAC | 2330 | GTGATCTGCTGGCCTTCTC |
| 2331 | AGAAGGCCAGCAGATCACT | 2332 | AGTGATCTGCTGGCCTTCT |
| 2333 | GAAGGCCAGCAGATCACTG | 2334 | CAGTGATCTGCTGGCCTTC |
| 2335 | AAGGCCAGCAGATCACTGA | 2336 | TCAGTGATCTGCTGGCCTT |
| 2337 | AGGCCAGCAGATCACTGAG | 2338 | CTCAGTGATCTGCTGGCCT |
| 2339 | GGCCAGCAGATCACTGAGA | 2340 | TCTCAGTGATCTGCTGGCC |
| 2341 | GCCAGCAGATCACTGAGAG | 2342 | CTCTCAGTGATCTGCTGGC |
| 2343 | CCAGCAGATCACTGAGAGT | 2344 | ACTCTCAGTGATCTGCTGG |
| 2345 | CAGCAGATCACTGAGAGTG | 2346 | CACTCTCAGTGATCTGCTG |
| 2347 | AGCAGATCACTGAGAGTGC | 2348 | GCACTCTCAGTGATCTGCT |
| 2349 | GCAGATCACTGAGAGTGCA | 2350 | TGCACTCTCAGTGATCTGC |
| 2351 | CAGATCACTGAGAGTGCAA | 2352 | TTGCACTCTCAGTGATCTG |
| 2353 | AGATCACTGAGAGTGCAAC | 2354 | GTTGCACTCTCAGTGATCT |
| 2355 | GATCACTGAGAGTGCAACC | 2356 | GGTTGCACTCTCAGTGATC |
| 2357 | ATCACTGAGAGTGCAACCC | 2358 | GGGTTGCACTCTCAGTGAT |
| 2359 | TCACTGAGAGTGCAACCCC | 2360 | GGGGTTGCACTCTCAGTGA |
| 2361 | CACTGAGAGTGCAACCCCA | 2362 | TGGGGTTGCACTCTCAGTG |
| 2363 | ACTGAGAGTGCAACCCCAC | 2364 | GTGGGGTTGCACTCTCAGT |
| 2365 | CTGAGAGTGCAACCCCACC | 2366 | GGTGGGGTTGCACTCTCAG |
| 2367 | TGAGAGTGCAACCCCACCC | 2368 | GGGTGGGGTTGCACTCTCA |
| 2369 | GAGAGTGCAACCCCACCCT | 2370 | AGGGTGGGGTTGCACTCTC |
| 2371 | AGAGTGCAACCCCACCCTC | 2372 | GAGGGTGGGGTTGCACTCT |
| 2373 | GAGTGCAACCCCACCCTCC | 2374 | GGAGGGTGGGGTTGCACTC |
| 2375 | AGTGCAACCCCACCCTCCA | 2376 | TGGAGGGTGGGGTTGCACT |
| 2377 | GTGCAACCCCACCCTCCAC | 2378 | GTGGAGGGTGGGGTTGCAC |
| 2379 | TGCAACCCCACCCTCCACA | 2380 | TGTGGAGGGTGGGGTTGCA |
| 2381 | GCAACCCCACCCTCCACAG | 2382 | CTGTGGAGGGTGGGGTTGC |
| 2383 | CAACCCCACCCTCCACAGG | 2384 | CCTGTGGAGGGTGGGGTTG |
| 2385 | AACCCCACCCTCCACAGGA | 2386 | TCCTGTGGAGGGTGGGGTT |
| 2387 | ACCCCACCCTCCACAGGAA | 2388 | TTCCTGTGGAGGGTGGGGT |
| 2389 | CCCCACCCTCCACAGGAAA | 2390 | TTTCCTGTGGAGGGTGGGG |
| 2391 | CCCACCCTCCACAGGAAAT | 2392 | ATTTCCTGTGGAGGGTGGG |
| 2393 | CCACCCTCCACAGGAAATT | 2394 | AATTTCCTGTGGAGGGTGG |
| 2395 | CACCCTCCACAGGAAATTG | 2396 | CAATTTCCTGTGGAGGGTG |
| 2397 | ACCCTCCACAGGAAATTGC | 2398 | GCAATTTCCTGTGGAGGGT |
| 2399 | CCCTCCACAGGAAATTGCC | 2400 | GGCAATTTCCTGTGGAGGG |
| 2401 | CCTCCACAGGAAATTGCCT | 2402 | AGGCAATTTCCTGTGGAGG |
| 2403 | CTCCACAGGAAATTGCCTC | 2404 | GAGGCAATTTCCTGTGGAG |
| 2405 | TCCACAGGAAATTGCCTCA | 2406 | TGAGGCAATTTCCTGTGGA |
| 2407 | CCACAGGAAATTGCCTCAT | 2408 | ATGAGGCAATTTCCTGTGG |
| 2409 | CACAGGAAATTGCCTCATG | 2410 | CATGAGGCAATTTCCTGTG |
| 2411 | ACAGGAAATTGCCTCATGG | 2412 | CCATGAGGCAATTTCCTGT |
| 2413 | CAGGAAATTGCCTCATGGG | 2414 | CCCATGAGGCAATTTCCTG |
| 2415 | AGGAAATTGCCTCATGGGC | 2416 | GCCCATGAGGCAATTTCCT |
| 2417 | GGAAATTGCCTCATGGGCA | 2418 | TGCCCATGAGGCAATTTCC |
| 2419 | GAAATTGCCTCATGGGCAG | 2420 | CTGCCCATGAGGCAATTTC |
| 2421 | AAATTGCCTCATGGGCAGG | 2422 | CCTGCCCATGAGGCAATTT |
| 2423 | AATTGCCTCATGGGCAGGG | 2424 | CCCTGCCCATGAGGCAATT |
| 2425 | ATTGCCTCATGGGCAGGGC | 2426 | GCCCTGCCCATGAGGCAAT |
| 2427 | TTGCCTCATGGGCAGGGCC | 2428 | GGCCCTGCCCATGAGGCAA |
| 2429 | TGCCTCATGGGCAGGGCCA | 2430 | TGGCCCTGCCCATGAGGCA |
| 2431 | GCCTCATGGGCAGGGCCAC | 2432 | GTGGCCCTGCCCATGAGGC |
| 2433 | CCTCATGGGCAGGGCCACA | 2434 | TGTGGCCCTGCCCATGAGG |
| 2435 | CTCATGGGCAGGGCCACAG | 2436 | CTGTGGCCCTGCCCATGAG |
| 2437 | TCATGGGCAGGGCCACAGC | 2438 | GCTGTGGCCCTGCCCATGA |
| 2439 | CATGGGCAGGGCCACAGCA | 2440 | TGCTGTGGCCCTGCCCATG |
| 2441 | ATGGGCAGGGCCACAGCAG | 2442 | CTGCTGTGGCCCTGCCCAT |
| 2443 | TGGGCAGGGCCACAGCAGA | 2444 | TCTGCTGTGGCCCTGCCCA |
| 2445 | GGGCAGGGCCACAGCAGAG | 2446 | CTCTGCTGTGGCCCTGCCC |
| 2447 | GGCAGGGCCACAGCAGAGA | 2448 | TCTCTGCTGTGGCCCTGCC |
| 2449 | GCAGGGCCACAGCAGAGAG | 2450 | CTCTCTGCTGTGGCCCTGC |
| 2451 | CAGGGCCACAGCAGAGAGA | 2452 | TCTCTCTGCTGTGGCCCTG |
| 2453 | AGGGCCACAGCAGAGAGAC | 2454 | GTCTCTCTGCTGTGGCCCT |
| 2455 | GGGCCACAGCAGAGAGACA | 2456 | TGTCTCTCTGCTGTGGCCC |
| 2457 | GGCCACAGCAGAGAGACAC | 2458 | GTGTCTCTCTGCTGTGGCC |
| 2459 | GCCACAGCAGAGAGACACA | 2460 | TGTGTCTCTCTGCTGTGGC |
| 2461 | CCACAGCAGAGAGACACAG | 2462 | CTGTGTCTCTCTGCTGTGG |
| 2463 | CACAGCAGAGAGACACAGC | 2464 | GCTGTGTCTCTCTGCTGTG |
| 2465 | ACAGCAGAGAGACACAGCA | 2466 | TGCTGTGTCTCTCTGCTGT |
| 2467 | CAGCAGAGAGACACAGCAT | 2468 | ATGCTGTGTCTCTCTGCTG |
| 2469 | AGCAGAGAGACACAGCATG | 2470 | CATGCTGTGTCTCTCTGCT |
| 2471 | GCAGAGAGACACAGCATGG | 2472 | CCATGCTGTGTCTCTCTGC |
| 2473 | CAGAGAGACACAGCATGGG | 2474 | CCCATGCTGTGTCTCTCTG |
| 2475 | AGAGAGACACAGCATGGGC | 2476 | GCCCATGCTGTGTCTCTCT |
| 2477 | GAGAGACACAGCATGGGCA | 2478 | TGCCCATGCTGTGTCTCTC |
| 2479 | AGAGACACAGCATGGGCAG | 2480 | CTGCCCATGCTGTGTCTCT |
| 2481 | GAGACACAGCATGGGCAGT | 2482 | ACTGCCCATGCTGTGTCTC |
| 2483 | AGACACAGCATGGGCAGTG | 2484 | CACTGCCCATGCTGTGTCT |
| 2485 | GACACAGCATGGGCAGTGC | 2486 | GCACTGCCCATGCTGTGTC |
| 2487 | ACACAGCATGGGCAGTGCC | 2488 | GGCACTGCCCATGCTGTGT |
| 2489 | CACAGCATGGGCAGTGCCT | 2490 | AGGCACTGCCCATGCTGTG |
| 2491 | ACAGCATGGGCAGTGCCTT | 2492 | AAGGCACTGCCCATGCTGT |
| 2493 | CAGCATGGGCAGTGCCTTC | 2494 | GAAGGCACTGCCCATGCTG |
| 2495 | AGCATGGGCAGTGCCTTCC | 2496 | GGAAGGCACTGCCCATGCT |
| 2497 | GCATGGGCAGTGCCTTCCC | 2498 | GGGAAGGCACTGCCCATGC |
| 2499 | CATGGGCAGTGCCTTCCCT | 2500 | AGGGAAGGCACTGCCCATG |
| 2501 | ATGGGCAGTGCCTTCCCTG | 2502 | CAGGGAAGGCACTGCCCAT |
| 2503 | TGGGCAGTGCCTTCCCTGC | 2504 | GCAGGGAAGGCACTGCCCA |
| 2505 | GGGCAGTGCCTTCCCTGCC | 2506 | GGCAGGGAAGGCACTGCCC |
| 2507 | GGCAGTGCCTTCCCTGCCT | 2508 | AGGCAGGGAAGGCACTGCC |
| 2509 | GCAGTGCCTTCCCTGCCTG | 2510 | CAGGCAGGGAAGGCACTGC |
| 2511 | CAGTGCCTTCCCTGCCTGT | 2512 | ACAGGCAGGGAAGGCACTG |
| 2513 | AGTGCCTTCCCTGCCTGTG | 2514 | CACAGGCAGGGAAGGCACT |
| 2515 | GTGCCTTCCCTGCCTGTGG | 2516 | CCACAGGCAGGGAAGGCAC |
| 2517 | TGCCTTCCCTGCCTGTGGG | 2518 | CCCACAGGCAGGGAAGGCA |
| 2519 | GCCTTCCCTGCCTGTGGGG | 2520 | CCCCACAGGCAGGGAAGGC |
| 2521 | CCTTCCCTGCCTGTGGGGG | 2522 | CCCCCACAGGCAGGGAAGG |
| 2523 | CTTCCCTGCCTGTGGGGGT | 2524 | ACCCCCACAGGCAGGGAAG |
| 2525 | TTCCCTGCCTGTGGGGGTC | 2526 | GACCCCCACAGGCAGGGAA |
| 2527 | TCCCTGCCTGTGGGGGTCA | 2528 | TGACCCCCACAGGCAGGGA |
| 2529 | CCCTGCCTGTGGGGGTCAT | 2530 | ATGACCCCCACAGGCAGGG |
| 2531 | CCTGCCTGTGGGGGTCATG | 2532 | CATGACCCCCACAGGCAGG |
| 2533 | CTGCCTGTGGGGGTCATGC | 2534 | GCATGACCCCCACAGGCAG |
| 2535 | TGCCTGTGGGGGTCATGCT | 2536 | AGCATGACCCCCACAGGCA |
| 2537 | GCCTGTGGGGGTCATGCTG | 2538 | CAGCATGACCCCCACAGGC |
| 2539 | CCTGTGGGGGTCATGCTGC | 2540 | GCAGCATGACCCCCACAGG |
| 2541 | CTGTGGGGGTCATGCTGCC | 2542 | GGCAGCATGACCCCCACAG |
| 2543 | TGTGGGGGTCATGCTGCCA | 2544 | TGGCAGCATGACCCCCACA |
| 2545 | GTGGGGGTCATGCTGCCAC | 2546 | GTGGCAGCATGACCCCCAC |
| 2547 | TGGGGGTCATGCTGCCACT | 2548 | AGTGGCAGCATGACCCCCA |
| 2549 | GGGGGTCATGCTGCCACTT | 2550 | AAGTGGCAGCATGACCCCC |
| 2551 | GGGGTCATGCTGCCACTTT | 2552 | AAAGTGGCAGCATGACCCC |
| 2553 | GGGTCATGCTGCCACTTTT | 2554 | AAAAGTGGCAGCATGACCC |
| 2555 | GGTCATGCTGCCACTTTTA | 2556 | TAAAAGTGGCAGCATGACC |
| 2557 | GTCATGCTGCCACTTTTAA | 2558 | TTAAAAGTGGCAGCATGAC |
| 2559 | TCATGCTGCCACTTTTAAT | 2560 | ATTAAAAGTGGCAGCATGA |
| 2561 | CATGCTGCCACTTTTAATG | 2562 | CATTAAAAGTGGCAGCATG |
| 2563 | ATGCTGCCACTTTTAATGG | 2564 | CCATTAAAAGTGGCAGCAT |
| 2565 | TGCTGCCACTTTTAATGGG | 2566 | CCCATTAAAAGTGGCAGCA |
| 2567 | GCTGCCACTTTTAATGGGT | 2568 | ACCCATTAAAAGTGGCAGC |
| 2569 | CTGCCACTTTTAATGGGTC | 2570 | GACCCATTAAAAGTGGCAG |
| 2571 | TGCCACTTTTAATGGGTCC | 2572 | GGACCCATTAAAAGTGGCA |
| 2573 | GCCACTTTTAATGGGTCCT | 2574 | AGGACCCATTAAAAGTGGC |
| 2575 | CCACTTTTAATGGGTCCTC | 2576 | GAGGACCCATTAAAAGTGG |
| 2577 | CACTTTTAATGGGTCCTCC | 2578 | GGAGGACCCATTAAAAGTG |
| 2579 | ACTTTTAATGGGTCCTCCA | 2580 | TGGAGGACCCATTAAAAGT |
| 2581 | CTTTTAATGGGTCCTCCAC | 2582 | GTGGAGGACCCATTAAAAG |
| 2583 | TTTTAATGGGTCCTCCACC | 2584 | GGTGGAGGACCCATTAAAA |
| 2585 | TTTAATGGGTCCTCCACCC | 2586 | GGGTGGAGGACCCATTAAA |
| 2587 | TTAATGGGTCCTCCACCCA | 2588 | TGGGTGGAGGACCCATTAA |
| 2589 | TAATGGGTCCTCCACCCAA | 2590 | TTGGGTGGAGGACCCATTA |
| 2591 | AATGGGTCCTCCACCCAAC | 2592 | GTTGGGTGGAGGACCCATT |
| 2593 | ATGGGTCCTCCACCCAACG | 2594 | CGTTGGGTGGAGGACCCAT |
| 2595 | TGGGTCCTCCACCCAACGG | 2596 | CCGTTGGGTGGAGGACCCA |
| 2597 | GGGTCCTCCACCCAACGGG | 2598 | CCCGTTGGGTGGAGGACCC |
| 2599 | GGTCCTCCACCCAACGGGG | 2600 | CCCCGTTGGGTGGAGGACC |
| 2601 | GTCCTCCACCCAACGGGGT | 2602 | ACCCCGTTGGGTGGAGGAC |
| 2603 | TCCTCCACCCAACGGGGTC | 2604 | GACCCCGTTGGGTGGAGGA |
| 2605 | CCTCCACCCAACGGGGTCA | 2606 | TGACCCCGTTGGGTGGAGG |
| 2607 | CTCCACCCAACGGGGTCAG | 2608 | CTGACCCCGTTGGGTGGAG |
| 2609 | TCCACCCAACGGGGTCAGG | 2610 | CCTGACCCCGTTGGGTGGA |
| 2611 | CCACCCAACGGGGTCAGGG | 2612 | CCCTGACCCCGTTGGGTGG |
| 2613 | CACCCAACGGGGTCAGGGA | 2614 | TCCCTGACCCCGTTGGGTG |
| 2615 | ACCCAACGGGGTCAGGGAG | 2616 | CTCCCTGACCCCGTTGGGT |
| 2617 | CCCAACGGGGTCAGGGAGG | 2618 | CCTCCCTGACCCCGTTGGG |
| 2619 | CCAACGGGGTCAGGGAGGT | 2620 | ACCTCCCTGACCCCGTTGG |
| 2621 | CAACGGGGTCAGGGAGGTG | 2622 | CACCTCCCTGACCCCGTTG |
| 2623 | AACGGGGTCAGGGAGGTGG | 2624 | CCACCTCCCTGACCCCGTT |
| 2625 | ACGGGGTCAGGGAGGTGGT | 2626 | ACCACCTCCCTGACCCCGT |
| 2627 | CGGGGTCAGGGAGGTGGTG | 2628 | CACCACCTCCCTGACCCCG |
| 2629 | GGGGTCAGGGAGGTGGTGC | 2630 | GCACCACCTCCCTGACCCC |
| 2631 | GGGTCAGGGAGGTGGTGCT | 2632 | AGCACCACCTCCCTGACCC |
| 2633 | GGTCAGGGAGGTGGTGCTG | 2634 | CAGCACCACCTCCCTGACC |
| 2635 | GTCAGGGAGGTGGTGCTGC | 2636 | GCAGCACCACCTCCCTGAC |
| 2637 | TCAGGGAGGTGGTGCTGCC | 2638 | GGCAGCACCACCTCCCTGA |
| 2639 | CAGGGAGGTGGTGCTGCCC | 2640 | GGGCAGCACCACCTCCCTG |
| 2641 | AGGGAGGTGGTGCTGCCCC | 2642 | GGGGCAGCACCACCTCCCT |
| 2643 | GGGAGGTGGTGCTGCCCCA | 2644 | TGGGGCAGCACCACCTCCC |
| 2645 | GGAGGTGGTGCTGCCCCAG | 2646 | CTGGGGCAGCACCACCTCC |
| 2647 | GAGGTGGTGCTGCCCCAGT | 2648 | ACTGGGGCAGCACCACCTC |
| 2649 | AGGTGGTGCTGCCCCAGTG | 2650 | CACTGGGGCAGCACCACCT |
| 2651 | GGTGGTGCTGCCCCAGTGG | 2652 | CCACTGGGGCAGCACCACC |
| 2653 | GTGGTGCTGCCCCAGTGGG | 2654 | CCCACTGGGGCAGCACCAC |
| 2655 | TGGTGCTGCCCCAGTGGGC | 2656 | GCCCACTGGGGCAGCACCA |
| 2657 | GGTGCTGCCCCAGTGGGCC | 2658 | GGCCCACTGGGGCAGCACC |
| 2659 | GTGCTGCCCCAGTGGGCCA | 2660 | TGGCCCACTGGGGCAGCAC |
| 2661 | TGCTGCCCCAGTGGGCCAT | 2662 | ATGGCCCACTGGGGCAGCA |
| 2663 | GCTGCCCCAGTGGGCCATG | 2664 | CATGGCCCACTGGGGCAGC |
| 2665 | CTGCCCCAGTGGGCCATGA | 2666 | TCATGGCCCACTGGGGCAG |
| 2667 | TGCCCCAGTGGGCCATGAT | 2668 | ATCATGGCCCACTGGGGCA |
| 2669 | GCCCCAGTGGGCCATGATT | 2670 | AATCATGGCCCACTGGGGC |
| 2671 | CCCCAGTGGGCCATGATTA | 2672 | TAATCATGGCCCACTGGGG |
| 2673 | CCCAGTGGGCCATGATTAT | 2674 | ATAATCATGGCCCACTGGG |
| 2675 | CCAGTGGGCCATGATTATC | 2676 | GATAATCATGGCCCACTGG |
| 2677 | CAGTGGGCCATGATTATCT | 2678 | AGATAATCATGGCCCACTG |
| 2679 | AGTGGGCCATGATTATCTT | 2680 | AAGATAATCATGGCCCACT |
| 2681 | GTGGGCCATGATTATCTTA | 2682 | TAAGATAATCATGGCCCAC |
| 2683 | TGGGCCATGATTATCTTAA | 2684 | TTAAGATAATCATGGCCCA |
| 2685 | GGGCCATGATTATCTTAAA | 2686 | TTTAAGATAATCATGGCCC |
| 2687 | GGCCATGATTATCTTAAAG | 2688 | CTTTAAGATAATCATGGCC |
| 2689 | GCCATGATTATCTTAAAGG | 2690 | CCTTTAAGATAATCATGGC |
| 2691 | CCATGATTATCTTAAAGGC | 2692 | GCCTTTAAGATAATCATGG |
| 2693 | CATGATTATCTTAAAGGCA | 2694 | TGCCTTTAAGATAATCATG |
| 2695 | ATGATTATCTTAAAGGCAT | 2696 | ATGCCTTTAAGATAATCAT |
| 2697 | TGATTATCTTAAAGGCATT | 2698 | AATGCCTTTAAGATAATCA |
| 2699 | GATTATCTTAAAGGCATTA | 2700 | TAATGCCTTTAAGATAATC |
| 2701 | ATTATCTTAAAGGCATTAT | 2702 | ATAATGCCTTTAAGATAAT |
| 2703 | TTATCTTAAAGGCATTATT | 2704 | AATAATGCCTTTAAGATAA |
| 2705 | TATCTTAAAGGCATTATTC | 2706 | GAATAATGCCTTTAAGATA |
| 2707 | ATCTTAAAGGCATTATTCT | 2708 | AGAATAATGCCTTTAAGAT |
| 2709 | TCTTAAAGGCATTATTCTC | 2710 | GAGAATAATGCCTTTAAGA |
| 2711 | CTTAAAGGCATTATTCTCC | 2712 | GGAGAATAATGCCTTTAAG |
| 2713 | TTAAAGGCATTATTCTCCA | 2714 | TGGAGAATAATGCCTTTAA |
| 2715 | TAAAGGCATTATTCTCCAG | 2716 | CTGGAGAATAATGCCTTTA |
| 2717 | AAAGGCATTATTCTCCAGC | 2718 | GCTGGAGAATAATGCCTTT |
| 2719 | AAGGCATTATTCTCCAGCC | 2720 | GGCTGGAGAATAATGCCTT |
| 2721 | AGGCATTATTCTCCAGCCT | 2722 | AGGCTGGAGAATAATGCCT |
| 2723 | GGCATTATTCTCCAGCCTT | 2724 | AAGGCTGGAGAATAATGCC |
| 2725 | GCATTATTCTCCAGCCTTA | 2726 | TAAGGCTGGAGAATAATGC |
| 2727 | CATTATTCTCCAGCCTTAA | 2728 | TTAAGGCTGGAGAATAATG |
| 2729 | ATTATTCTCCAGCCTTAAG | 2730 | CTTAAGGCTGGAGAATAAT |
| 2731 | TTATTCTCCAGCCTTAAGT | 2732 | ACTTAAGGCTGGAGAATAA |
| 2733 | TATTCTCCAGCCTTAAGTA | 2734 | TACTTAAGGCTGGAGAATA |
| 2735 | ATTCTCCAGCCTTAAGTAA | 2736 | TTACTTAAGGCTGGAGAAT |
| 2737 | TTCTCCAGCCTTAAGTAAG | 2738 | CTTACTTAAGGCTGGAGAA |
| 2739 | TCTCCAGCCTTAAGTAAGA | 2740 | TCTTACTTAAGGCTGGAGA |
| 2741 | CTCCAGCCTTAAGTAAGAT | 2742 | ATCTTACTTAAGGCTGGAG |
| 2743 | TCCAGCCTTAAGTAAGATC | 2744 | GATCTTACTTAAGGCTGGA |
| 2745 | CCAGCCTTAAGTAAGATCT | 2746 | AGATCTTACTTAAGGCTGG |
| 2747 | CAGCCTTAAGTAAGATCTT | 2748 | AAGATCTTACTTAAGGCTG |
| 2749 | AGCCTTAAGTAAGATCTTA | 2750 | TAAGATCTTACTTAAGGCT |
| 2751 | GCCTTAAGTAAGATCTTAG | 2752 | CTAAGATCTTACTTAAGGC |
| 2753 | CCTTAAGTAAGATCTTAGG | 2754 | CCTAAGATCTTACTTAAGG |
| 2755 | CTTAAGTAAGATCTTAGGA | 2756 | TCCTAAGATCTTACTTAAG |
| 2757 | TTAAGTAAGATCTTAGGAC | 2758 | GTCCTAAGATCTTACTTAA |
| 2759 | TAAGTAAGATCTTAGGACG | 2760 | CGTCCTAAGATCTTACTTA |
| 2761 | AAGTAAGATCTTAGGACGT | 2762 | ACGTCCTAAGATCTTACTT |
| 2763 | AGTAAGATCTTAGGACGTT | 2764 | AACGTCCTAAGATCTTACT |
| 2765 | GTAAGATCTTAGGACGTTT | 2766 | AAACGTCCTAAGATCTTAC |
| 2767 | TAAGATCTTAGGACGTTTC | 2768 | GAAACGTCCTAAGATCTTA |
| 2769 | AAGATCTTAGGACGTTTCC | 2770 | GGAAACGTCCTAAGATCTT |
| 2771 | AGATCTTAGGACGTTTCCT | 2772 | AGGAAACGTCCTAAGATCT |
| 2773 | GATCTTAGGACGTTTCCTT | 2774 | AAGGAAACGTCCTAAGATC |
| 2775 | ATCTTAGGACGTTTCCTTT | 2776 | AAAGGAAACGTCCTAAGAT |
| 2777 | TCTTAGGACGTTTCCTTTG | 2778 | CAAAGGAAACGTCCTAAGA |
| 2779 | CTTAGGACGTTTCCTTTGC | 2780 | GCAAAGGAAACGTCCTAAG |
| 2781 | TTAGGACGTTTCCTTTGCT | 2782 | AGCAAAGGAAACGTCCTAA |
| 2783 | TAGGACGTTTCCTTTGCTA | 2784 | TAGCAAAGGAAACGTCCTA |
| 2785 | AGGACGTTTCCTTTGCTAT | 2786 | ATAGCAAAGGAAACGTCCT |
| 2787 | GGACGTTTCCTTTGCTATG | 2788 | CATAGCAAAGGAAACGTCC |
| 2789 | GACGTTTCCTTTGCTATGA | 2790 | TCATAGCAAAGGAAACGTC |
| 2791 | ACGTTTCCTTTGCTATGAT | 2792 | ATCATAGCAAAGGAAACGT |
| 2793 | CGTTTCCTTTGCTATGATT | 2794 | AATCATAGCAAAGGAAACG |
| 2795 | GTTTCCTTTGCTATGATTT | 2796 | AAATCATAGCAAAGGAAAC |
| 2797 | TTTCCTTTGCTATGATTTG | 2798 | CAAATCATAGCAAAGGAAA |
| 2799 | TTCCTTTGCTATGATTTGT | 2800 | ACAAATCATAGCAAAGGAA |
| 2801 | TCCTTTGCTATGATTTGTA | 2802 | TACAAATCATAGCAAAGGA |
| 2803 | CCTTTGCTATGATTTGTAC | 2804 | GTACAAATCATAGCAAAGG |
| 2805 | CTTTGCTATGATTTGTACT | 2806 | AGTACAAATCATAGCAAAG |
| 2807 | TTTGCTATGATTTGTACTT | 2808 | AAGTACAAATCATAGCAAA |
| 2809 | TTGCTATGATTTGTACTTG | 2810 | CAAGTACAAATCATAGCAA |
| 2811 | TGCTATGATTTGTACTTGC | 2812 | GCAAGTACAAATCATAGCA |
| 2813 | GCTATGATTTGTACTTGCT | 2814 | AGCAAGTACAAATCATAGC |
| 2815 | CTATGATTTGTACTTGCTT | 2816 | AAGCAAGTACAAATCATAG |
| 2817 | TATGATTTGTACTTGCTTG | 2818 | CAAGCAAGTACAAATCATA |
| 2819 | ATGATTTGTACTTGCTTGA | 2820 | TCAAGCAAGTACAAATCAT |
| 2821 | TGATTTGTACTTGCTTGAG | 2822 | CTCAAGCAAGTACAAATCA |
| 2823 | GATTTGTACTTGCTTGAGT | 2824 | ACTCAAGCAAGTACAAATC |
| 2825 | ATTTGTACTTGCTTGAGTC | 2826 | GACTCAAGCAAGTACAAAT |
| 2827 | TTTGTACTTGCTTGAGTCC | 2828 | GGACTCAAGCAAGTACAAA |
| 2829 | TTGTACTTGCTTGAGTCCC | 2830 | GGGACTCAAGCAAGTACAA |
| 2831 | TGTACTTGCTTGAGTCCCA | 2832 | TGGGACTCAAGCAAGTACA |
| 2833 | GTACTTGCTTGAGTCCCAT | 2834 | ATGGGACTCAAGCAAGTAC |
| 2835 | TACTTGCTTGAGTCCCATG | 2836 | CATGGGACTCAAGCAAGTA |
| 2837 | ACTTGCTTGAGTCCCATGA | 2838 | TCATGGGACTCAAGCAAGT |
| 2839 | CTTGCTTGAGTCCCATGAC | 2840 | GTCATGGGACTCAAGCAAG |
| 2841 | TTGCTTGAGTCCCATGACT | 2842 | AGTCATGGGACTCAAGCAA |
| 2843 | TGCTTGAGTCCCATGACTG | 2844 | CAGTCATGGGACTCAAGCA |
| 2845 | GCTTGAGTCCCATGACTGT | 2846 | ACAGTCATGGGACTCAAGC |
| 2847 | CTTGAGTCCCATGACTGTT | 2848 | AACAGTCATGGGACTCAAG |
| 2849 | TTGAGTCCCATGACTGTTT | 2850 | AAACAGTCATGGGACTCAA |
| 2851 | TGAGTCCCATGACTGTTTC | 2852 | GAAACAGTCATGGGACTCA |
| 2853 | GAGTCCCATGACTGTTTCT | 2854 | AGAAACAGTCATGGGACTC |
| 2855 | AGTCCCATGACTGTTTCTC | 2856 | GAGAAACAGTCATGGGACT |
| 2857 | GTCCCATGACTGTTTCTCT | 2858 | AGAGAAACAGTCATGGGAC |
| 2859 | TCCCATGACTGTTTCTCTT | 2860 | AAGAGAAACAGTCATGGGA |
| 2861 | CCCATGACTGTTTCTCTTC | 2862 | GAAGAGAAACAGTCATGGG |
| 2863 | CCATGACTGTTTCTCTTCC | 2864 | GGAAGAGAAACAGTCATGG |
| 2865 | CATGACTGTTTCTCTTCCT | 2866 | AGGAAGAGAAACAGTCATG |
| 2867 | ATGACTGTTTCTCTTCCTC | 2868 | GAGGAAGAGAAACAGTCAT |
| 2869 | TGACTGTTTCTCTTCCTCT | 2870 | AGAGGAAGAGAAACAGTCA |
| 2871 | GACTGTTTCTCTTCCTCTC | 2872 | GAGAGGAAGAGAAACAGTC |
| 2873 | ACTGTTTCTCTTCCTCTCT | 2874 | AGAGAGGAAGAGAAACAGT |
| 2875 | CTGTTTCTCTTCCTCTCTT | 2876 | AAGAGAGGAAGAGAAACAG |
| 2877 | TGTTTCTCTTCCTCTCTTT | 2878 | AAAGAGAGGAAGAGAAACA |
| 2879 | GTTTCTCTTCCTCTCTTTC | 2880 | GAAAGAGAGGAAGAGAAAC |
| 2881 | TTTCTCTTCCTCTCTTTCT | 2882 | AGAAAGAGAGGAAGAGAAA |
| 2883 | TTCTCTTCCTCTCTTTCTT | 2884 | AAGAAAGAGAGGAAGAGAA |
| 2885 | TCTCTTCCTCTCTTTCTTC | 2886 | GAAGAAAGAGAGGAAGAGA |
| 2887 | CTCTTCCTCTCTTTCTTCC | 2888 | GGAAGAAAGAGAGGAAGAG |
| 2889 | TCTTCCTCTCTTTCTTCCT | 2890 | AGGAAGAAAGAGAGGAAGA |
| 2891 | CTTCCTCTCTTTCTTCCTT | 2892 | AAGGAAGAAAGAGAGGAAG |
| 2893 | TTCCTCTCTTTCTTCCTTT | 2894 | AAAGGAAGAAAGAGAGGAA |
| 2895 | TCCTCTCTTTCTTCCTTTT | 2896 | AAAAGGAAGAAAGAGAGGA |
| 2897 | CCTCTCTTTCTTCCTTTTG | 2898 | CAAAAGGAAGAAAGAGAGG |
| 2899 | CTCTCTTTCTTCCTTTTGG | 2900 | CCAAAAGGAAGAAAGAGAG |
| 2901 | TCTCTTTCTTCCTTTTGGA | 2902 | TCCAAAAGGAAGAAAGAGA |
| 2903 | CTCTTTCTTCCTTTTGGAA | 2904 | TTCCAAAAGGAAGAAAGAG |
| 2905 | TCTTTCTTCCTTTTGGAAT | 2906 | ATTCCAAAAGGAAGAAAGA |
| 2907 | CTTTCTTCCTTTTGGAATA | 2908 | TATTCCAAAAGGAAGAAAG |
| 2909 | TTTCTTCCTTTTGGAATAG | 2910 | CTATTCCAAAAGGAAGAAA |
| 2911 | TTCTTCCTTTTGGAATAGT | 2912 | ACTATTCCAAAAGGAAGAA |
| 2913 | TCTTCCTITTGGAATAGTA | 2914 | TACTATTCCAAAAGGAAGA |
| 2915 | CTTCCTTTTGGAATAGTAA | 2916 | TTACTATTCCAAAAGGAAG |
| 2917 | TTCCTTTTGGAATAGTAAT | 2918 | ATTACTATTCCAAAAGGAA |
| 2919 | TCCTTTTGGAATAGTAATA | 2920 | TATTACTATTCCAAAAGGA |
| 2921 | CCTTTTGGAATAGTAATAT | 2922 | ATATTACTATTCCAAAAGG |
| 2923 | CTTTTGGAATAGTAATATC | 2924 | GATATTACTATTCCAAAAG |
| 2925 | TTTTGGAATAGTAATATCC | 2926 | GGATATTACTATTCCAAAA |
| 2927 | TTTGGAATAGTAATATCCA | 2928 | TGGATATTACTATTCCAAA |
| 2929 | TTGGAATAGTAATATCCAT | 2930 | ATGGATATTACTATTCCAA |
| 2931 | TGGAATAGTAATATCCATC | 2932 | GATGGATATTACTATTCCA |
| 2933 | GGAATAGTAATATCCATCC | 2934 | GGATGGATATTACTATTCC |
| 2935 | GAATAGTAATATCCATCCT | 2936 | AGGATGGATATTACTATTC |
| 2937 | AATAGTAATATCCATCCTA | 2938 | TAGGATGGATATTACTATT |
| 2939 | ATAGTAATATCCATCCTAT | 2940 | ATAGGATGGATATTACTAT |
| 2941 | TAGTAATATCCATCCTATG | 2942 | CATAGGATGGATATTACTA |
| 2943 | AGTAATATCCATCCTATGT | 2944 | ACATAGGATGGATATTACT |
| 2945 | GTAATATCCATCCTATGTT | 2946 | AACATAGGATGGATATTAC |
| 2947 | TAATATCCATCCTATGTTT | 2948 | AAACATAGGATGGATATTA |
| 2949 | AATATCCATCCTATGTTTG | 2950 | CAAACATAGGATGGATATT |
| 2951 | ATATCCATCCTATGTTTGT | 2952 | ACAAACATAGGATGGATAT |
| 2953 | TATCCATCCTATGTTTGTC | 2954 | GACAAACATAGGATGGATA |
| 2955 | ATCCATCCTATGTTTGTCC | 2956 | GGACAAACATAGGATGGAT |
| 2957 | TCCATCCTATGTTTGTCCC | 2958 | GGGACAAACATAGGATGGA |
| 2959 | CCATCCTATGTTTGTCCCA | 2960 | TGGGACAAACATAGGATGG |
| 2961 | CATCCTATGTTTGTCCCAC | 2962 | GTGGGACAAACATAGGATG |
| 2963 | ATCCTATGTTTGTCCCACT | 2964 | AGTGGGACAAACATAGGAT |
| 2965 | TCCTATGTTTGTCCCACTA | 2966 | TAGTGGGACAAACATAGGA |
| 2967 | CCTATGTTTGTCCCACTAT | 2968 | ATAGTGGGACAAACATAGG |
| 2969 | CTATGTTTGTCCCACTATT | 2970 | AATAGTGGGACAAACATAG |
| 2971 | TATGTTTGTCCCACTATTG | 2972 | CAATAGTGGGACAAACATA |
| 2973 | ATGTTTGTCCCACTATTGT | 2974 | ACAATAGTGGGACAAACAT |
| 2975 | TGTTTGTCCCACTATTGTA | 2976 | TACAATAGTGGGACAAACA |
| 2977 | GTTTGTCCCACTATTGTAT | 2978 | ATACAATAGTGGGACAAAC |
| 2979 | TTTGTCCCACTATTGTATT | 2980 | AATACAATAGTGGGACAAA |
| 2981 | TTGTCCCACTATTGTATTT | 2982 | AAATACAATAGTGGGACAA |
| 2983 | TGTCCCACTATTGTATTTT | 2984 | AAAATACAATAGTGGGACA |
| 2985 | GTCCCACTATTGTATTTTG | 2986 | CAAAATACAATAGTGGGAC |
| 2987 | TCCCACTATTGTATTTTGG | 2988 | CCAAAATACAATAGTGGGA |
| 2989 | CCCACTATTGTATTTTGGA | 2990 | TCCAAAATACAATAGTGGG |
| 2991 | CCACTATTGTATTTTGGAA | 2992 | TTCCAAAATACAATAGTGG |
| 2993 | CACTATTGTATTTTGGAAG | 2994 | CTTCCAAAATACAATAGTG |
| 2995 | ACTATTGTATTTTGGAAGC | 2996 | GCTTCCAAAATACAATAGT |
| 2997 | CTATTGTATTTTGGAAGCA | 2998 | TGCTTCCAAAATACAATAG |
| 2999 | TATTGTATTTTGGAAGCAC | 3000 | GTGCTTCCAAAATACAATA |
| 3001 | ATTGTATTTTGGAAGCACA | 3002 | TGTGCTTCCAAAATACAAT |
| 3003 | TTGTATTTTGGAAGCACAT | 3004 | ATGTGCTTCCAAAATACAA |
| 3005 | TGTATTTTGGAAGCACATA | 3006 | TATGTGCTTCCAAAATACA |
| 3007 | GTATTTTGGAAGCACATAA | 3008 | TTATGTGCTTCCAAAATAC |
| 3009 | TATTTTGGAAGCACATAAC | 3010 | GTTATGTGCTTCCAAAATA |
| 3011 | ATTTTGGAAGCACATAACT | 3012 | AGTTATGTGCTTCCAAAAT |
| 3013 | TTTTGGAAGCACATAACTT | 3014 | AAGTTATGTGCTTCCAAAA |
| 3015 | TTTGGAAGCACATAACTTG | 3016 | CAAGTTATGTGCTTCCAAA |
| 3017 | TTGGAAGCACATAACTTGT | 3018 | ACAAGTTATGTGCTTCCAA |
| 3019 | TGGAAGCACATAACTTGTT | 3020 | AACAAGTTATGTGCTTCCA |
| 3021 | GGAAGCACATAACTTGTTT | 3022 | AAACAAGTTATGTGCTTCC |
| 3023 | GAAGCACATAACTTGTTTG | 3024 | CAAACAAGTTATGTGCTTC |
| 3025 | AAGCACATAACTTGTTTGG | 3026 | CCAAACAAGTTATGTGCTT |
| 3027 | AGCACATAACTTGTTTGGT | 3028 | ACCAAACAAGTTATGTGCT |
| 3029 | GCACATAACTTGTTTGGTT | 3030 | AACCAAACAAGTTATGTGC |
| 3031 | CACATAACTTGTTTGGTTT | 3032 | AAACCAAACAAGTTATGTG |
| 3033 | ACATAACTTGTTTGGTTTC | 3034 | GAAACCAAACAAGTTATGT |
| 3035 | CATAACTTGTTTGGTTTCA | 3036 | TGAAACCAAACAAGTTATG |
| 3037 | ATAACTTGTTTGGTTTCAC | 3038 | GTGAAACCAAACAAGTTAT |
| 3039 | TAACTTGTTTGGTTTCACA | 3040 | TGTGAAACCAAACAAGTTA |
| 3041 | AACTTGTTTGGTTTCACAG | 3042 | CTGTGAAACCAAACAAGTT |
| 3043 | ACTTGTTTGGTTTCACAGG | 3044 | CCTGTGAAACCAAACAAGT |
| 3045 | CTTGTTTGGTTTCACAGGT | 3046 | ACCTGTGAAACCAAACAAG |
| 3047 | TTGTTTGGTTTCACAGGTT | 3048 | AACCTGTGAAACCAAACAA |
| 3049 | TGTTTGGTTTCACAGGTTC | 3050 | GAACCTGTGAAACCAAACA |
| 3051 | GTTTGGTTTCACAGGTTCA | 3052 | TGAACCTGTGAAACCAAAC |
| 3053 | TTTGGTTTCACAGGTTCAC | 3054 | GTGAACCTGTGAAACCAAA |
| 3055 | TTGGTTTCACAGGTTCACA | 3056 | TGTGAACCTGTGAAACCAA |
| 3057 | TGGTTTCACAGGTTCACAG | 3058 | CTGTGAACCTGTGAAACCA |
| 3059 | GGTTTCACAGGTTCACAGT | 3060 | ACTGTGAACCTGTGAAACC |
| 3061 | GTTTCACAGGTTCACAGTT | 3062 | AACTGTGAACCTGTGAAAC |
| 3063 | TTTCACAGGTTCACAGTTA | 3064 | TAACTGTGAACCTGTGAAA |
| 3065 | TTCACAGGTTCACAGTTAA | 3066 | TTAACTGTGAACCTGTGAA |
| 3067 | TCACAGGTTCACAGTTAAG | 3068 | CTTAACTGTGAACCTGTGA |
| 3069 | CACAGGTTCACAGTTAAGA | 3070 | TCTTAACTGTGAACCTGTG |
| 3071 | ACAGGTTCACAGTTAAGAA | 3072 | TTCTTAACTGTGAACCTGT |
| 3073 | CAGGTTCACAGTTAAGAAG | 3074 | CTTCTTAACTGTGAACCTG |
| 3075 | AGGTTCACAGTTAAGAAGG | 3076 | CCTTCTTAACTGTGAACCT |
| 3077 | GGTTCACAGTTAAGAAGGA | 3078 | TCCTTCTTAACTGTGAACC |
| 3079 | GTTCACAGTTAAGAAGGAA | 3080 | TTCCTTCTTAACTGTGAAC |
| 3081 | TTCACAGTTAAGAAGGAAT | 3082 | ATTCCTTCTTAACTGTGAA |
| 3083 | TCACAGTTAAGAAGGAATT | 3084 | AATTCCTTCTTAACTGTGA |
| 3085 | CACAGTTAAGAAGGAATTT | 3086 | AAATTCCTTCTTAACTGTG |
| 3087 | ACAGTTAAGAAGGAATTTT | 3088 | AAAATTCCTTCTTAACTGT |
| 3089 | CAGTTAAGAAGGAATTTTG | 3090 | CAAAATTCCTTCTTAACTG |
| 3091 | AGTTAAGAAGGAATTTTGC | 3092 | GCAAAATTCCTTCTTAACT |
| 3093 | GTTAAGAAGGAATTTTGCC | 3094 | GGCAAAATTCCTTCTTAAC |
| 3095 | TTAAGAAGGAATTTTGCCT | 3096 | AGGCAAAATTCCTTCTTAA |
| 3097 | TAAGAAGGAATTTTGCCTC | 3098 | GAGGCAAAATTCCTTCTTA |
| 3099 | AAGAAGGAATTTTGCCTCT | 3100 | AGAGGCAAAATTCCTTCTT |
| 3101 | AGAAGGAATTTTGCCTCTG | 3102 | CAGAGGCAAAATTCCTTCT |
| 3103 | GAAGGAATTTTGCCTCTGA | 3104 | TCAGAGGCAAAATTCCTTC |
| 3105 | AAGGAATTTTGCCTCTGAA | 3106 | TTCAGAGGCAAAATTCCTT |
| 3107 | AGGAATTTTGCCTCTGAAT | 3108 | ATTCAGAGGCAAAATTCCT |
| 3109 | GGAATTTTGCCTCTGAATA | 3110 | TATTCAGAGGCAAAATTCC |
| 3111 | GAATTTTGCCTCTGAATAA | 3112 | TTATTCAGAGGCAAAATTC |
| 3113 | AATTTTGCCTCTGAATAAA | 3114 | TTTATTCAGAGGCAAAATT |
| 3115 | ATTTTGCCTCTGAATAAAT | 3116 | ATTTATTCAGAGGCAAAAT |
| 3117 | TTTTGCCTCTGAATAAATA | 3118 | TATTTATTCAGAGGCAAAA |
| 3119 | TTTGCCTCTGAATAAATAG | 3120 | CTATTTATTCAGAGGCAAA |
| 3121 | TTGCCTCTGAATAAATAGA | 3122 | TCTATTTATTCAGAGGCAA |
| 3123 | TGCCTCTGAATAAATAGAA | 3124 | TTCTATTTATTCAGAGGCA |
| 3125 | GCCTCTGAATAAATAGAAT | 3126 | ATTCTATTTATTCAGAGGC |
| 3127 | CCTCTGAATAAATAGAATC | 3128 | GATTCTATTTATTCAGAGG |
| 3129 | CTCTGAATAAATAGAATCT | 3130 | AGATTCTATTTATTCAGAG |
| 3131 | TCTGAATAAATAGAATCTT | 3132 | AAGATTCTATTTATTCAGA |
| 3133 | CTGAATAAATAGAATCTTG | 3134 | CAAGATTCTATTTATTCAG |
| 3135 | TGAATAAATAGAATCTTGA | 3136 | TCAAGATTCTATTTATTCA |
| 3137 | GAATAAATAGAATCTTGAG | 3138 | CTCAAGATTCTATTTATTC |
| 3139 | AATAAATAGAATCTTGAGT | 3140 | ACTCAAGATTCTATTTATT |
| 3141 | ATAAATAGAATCTTGAGTC | 3142 | GACTCAAGATTCTATTTAT |
| 3143 | TAAATAGAATCTTGAGTCT | 3144 | AGACTCAAGATTCTATTTA |
| 3145 | AAATAGAATCTTGAGTCTC | 3146 | GAGACTCAAGATTCTATTT |
| 3147 | AATAGAATCTTGAGTCTCA | 3148 | TGAGACTCAAGATTCTATT |
| 3149 | ATAGAATCTTGAGTCTCAT | 3150 | ATGAGACTCAAGATTCTAT |
| 3151 | TAGAATCTTGAGTCTCATG | 3152 | CATGAGACTCAAGATTCTA |
| 3153 | AGAATCTTGAGTCTCATGC | 3154 | GCATGAGACTCAAGATTCT |

TABLE 11
Human RAET1L NM_130900

| SEQID NO. | siRNA (19bp) | SEQID NO. | Reverse complement |
|---|---|---|---|
| 3155 | GATTTCATCTTCCAGGATC | 3156 | GATCCTGGAAGATGAAATC |
| 3157 | ATTTCATCTTCCAGGATCC | 3158 | GGATCCTGGAAGATGAAAT |
| 3159 | TTTCATCTTCCAGGATCCA | 3160 | TGGATCCTGGAAGATGAAA |
| 3161 | TTCATCTTCCAGGATCCAC | 3162 | GTGGATCCTGGAAGATGAA |
| 3163 | TCATCTTCCAGGATCCACC | 3164 | GGTGGATCCTGGAAGATGA |
| 3165 | CATCTTCCAGGATCCACCT | 3166 | AGGTGGATCCTGGAAGATG |
| 3167 | ATCTTCCAGGATCCACCTT | 3168 | AAGGTGGATCCTGGAAGAT |
| 3169 | TCTTCCAGGATCCACCTTG | 3170 | CAAGGTGGATCCTGGAAGA |
| 3171 | CTTCCAGGATCCACCTTGA | 3172 | TCAAGGTGGATCCTGGAAG |
| 3173 | TTCCAGGATCCACCTTGAT | 3174 | ATCAAGGTGGATCCTGGAA |
| 3175 | TCCAGGATCCACCTTGATT | 3176 | AATCAAGGTGGATCCTGGA |
| 3177 | CCAGGATCCACCTTGATTA | 3178 | TAATCAAGGTGGATCCTGG |
| 3179 | CAGGATCCACCTTGATTAA | 3180 | TTAATCAAGGTGGATCCTG |
| 3181 | AGGATCCACCTTGATTAAA | 3182 | TTTAATCAAGGTGGATCCT |
| 3183 | GGATCCACCTTGATTAAAT | 3184 | ATTTAATCAAGGTGGATCC |
| 3185 | GATCCACCTTGATTAAATC | 3186 | GATTTAATCAAGGTGGATC |
| 3187 | ATCCACCTTGATTAAATCT | 3188 | AGATTTAATCAAGGTGGAT |
| 3189 | TCCACCTTGATTAAATCTC | 3190 | GAGATTTAATCAAGGTGGA |
| 3191 | CCACCTTGATTAAATCTCT | 3192 | AGAGATTTAATCAAGGTGG |
| 3193 | CACCTTGATTAAATCTCTT | 3194 | AAGAGATTTAATCAAGGTG |
| 3195 | ACCTTGATTAAATCTCTTG | 3196 | CAAGAGATTTAATCAAGGT |
| 3197 | CCTTGATTAAATCTCTTGT | 3198 | ACAAGAGATTTAATCAAGG |
| 3199 | CTTGATTAAATCTCTTGTC | 3200 | GACAAGAGATTTAATCAAG |
| 3201 | TTGATTAAATCTCTTGTCC | 3202 | GGACAAGAGATTTAATCAA |
| 3203 | TGATTAAATCTCTTGTCCC | 3204 | GGGACAAGAGATTTAATCA |
| 3205 | GATTAAATCTCTTGTCCCC | 3206 | GGGGACAAGAGATTTAATC |
| 3207 | ATTAAATCTCTTGTCCCCA | 3208 | TGGGGACAAGAGATTTAAT |
| 3209 | TTAAATCTCTTGTCCCCAG | 3210 | CTGGGGACAAGAGATTTAA |
| 3211 | TAAATCTCTTGTCCCCAGC | 3212 | GCTGGGGACAAGAGATTTA |
| 3213 | AAATCTCTTGTCCCCAGCC | 3214 | GGCTGGGGACAAGAGATTT |
| 3215 | AATCTCTTGTCCCCAGCCC | 3216 | GGGCTGGGGACAAGAGATT |
| 3217 | ATCTCTTGTCCCCAGCCCT | 3218 | AGGGCTGGGGACAAGAGAT |
| 3219 | TCTCTTGTCCCCAGCCCTC | 3220 | GAGGGCTGGGGACAAGAGA |
| 3221 | CTCTTGTCCCCAGCCCTCC | 3222 | GGAGGGCTGGGGACAAGAG |
| 3223 | TCTTGTCCCCAGCCCTCCT | 3224 | AGGAGGGCTGGGGACAAGA |
| 3225 | CTTGTCCCCAGCCCTCCTG | 3226 | CAGGAGGGCTGGGGACAAG |
| 3227 | TTGTCCCCAGCCCTCCTGG | 3228 | CCAGGAGGGCTGGGGACAA |
| 3229 | TGTCCCCAGCCCTCCTGGT | 3230 | ACCAGGAGGGCTGGGGACA |
| 3231 | GTCCCCAGCCCTCCTGGTC | 3232 | GACCAGGAGGGCTGGGGAC |
| 3233 | TCCCCAGCCCTCCTGGTCC | 3234 | GGACCAGGAGGGCTGGGGA |
| 3235 | CCCCAGCCCTCCTGGTCCC | 3236 | GGGACCAGGAGGGCTGGGG |
| 3237 | CCCAGCCCTCCTGGTCCCC | 3238 | GGGGACCAGGAGGGCTGGG |
| 3239 | CCAGCCCTCCTGGTCCCCA | 3240 | TGGGGACCAGGAGGGCTGG |
| 3241 | CAGCCCTCCTGGTCCCCAA | 3242 | TTGGGGACCAGGAGGGCTG |
| 3243 | AGCCCTCCTGGTCCCCAAT | 3244 | ATTGGGGACCAGGAGGGCT |
| 3245 | GCCCTCCTGGTCCCCAATG | 3246 | CATTGGGGACCAGGAGGGC |
| 3247 | CCCTCCTGGTCCCCAATGG | 3248 | CCATTGGGGACCAGGAGGG |
| 3249 | CCTCCTGGTCCCCAATGGC | 3250 | GCCATTGGGGACCAGGAGG |
| 3251 | CTCCTGGTCCCCAATGGCA | 3252 | TGCCATTGGGGACCAGGAG |
| 3253 | TCCTGGTCCCCAATGGCAG | 3254 | CTGCCATTGGGGACCAGGA |
| 3255 | CCTGGTCCCCAATGGCAGC | 3256 | GCTGCCATTGGGGACCAGG |
| 3257 | CTGGTCCCCAATGGCAGCA | 3258 | TGCTGCCATTGGGGACCAG |
| 3259 | TGGTCCCCAATGGCAGCAG | 3260 | CTGCTGCCATTGGGGACCA |
| 3261 | GGTCCCCAATGGCAGCAGC | 3262 | GCTGCTGCCATTGGGGACC |
| 3263 | GTCCCCAATGGCAGCAGCC | 3264 | GGCTGCTGCCATTGGGGAC |
| 3265 | TCCCCAATGGCAGCAGCCG | 3266 | CGGCTGCTGCCATTGGGGA |
| 3267 | CCCCAATGGCAGCAGCCGC | 3268 | GCGGCTGCTGCCATTGGGG |
| 3269 | CCCAATGGCAGCAGCCGCC | 3270 | GGCGGCTGCTGCCATTGGG |
| 3271 | CCAATGGCAGCAGCCGCCA | 3272 | TGGCGGCTGCTGCCATTGG |
| 3273 | CAATGGCAGCAGCCGCCAT | 3274 | ATGGCGGCTGCTGCCATTG |
| 3275 | AATGGCAGCAGCCGCCATC | 3276 | GATGGCGGCTGCTGCCATT |
| 3277 | ATGGCAGCAGCCGCCATCC | 3278 | GGATGGCGGCTGCTGCCAT |
| 3279 | TGGCAGCAGCCGCCATCCC | 3280 | GGGATGGCGGCTGCTGCCA |
| 3281 | GGCAGCAGCCGCCATCCCA | 3282 | TGGGATGGCGGCTGCTGCC |
| 3283 | GCAGCAGCCGCCATCCCAG | 3284 | CTGGGATGGCGGCTGCTGC |
| 3285 | CAGCAGCCGCCATCCCAGC | 3286 | GCTGGGATGGCGGCTGCTG |
| 3287 | AGCAGCCGCCATCCCAGCT | 3288 | AGCTGGGATGGCGGCTGCT |
| 3289 | GCAGCCGCCATCCCAGCTT | 3290 | AAGCTGGGATGGCGGCTGC |
| 3291 | CAGCCGCCATCCCAGCTTT | 3292 | AAAGCTGGGATGGCGGCTG |
| 3293 | AGCCGCCATCCCAGCTTTG | 3294 | CAAAGCTGGGATGGCGGCT |
| 3295 | GCCGCCATCCCAGCTTTGC | 3296 | GCAAAGCTGGGATGGCGGC |
| 3297 | CCGCCATCCCAGCTTTGCT | 3298 | AGCAAAGCTGGGATGGCGG |
| 3299 | CGCCATCCCAGCTTTGCTT | 3300 | AAGCAAAGCTGGGATGGCG |
| 3301 | GCCATCCCAGCTTTGCTTC | 3302 | GAAGCAAAGCTGGGATGGC |
| 3303 | CCATCCCAGCTTTGCTTCT | 3304 | AGAAGCAAAGCTGGGATGG |
| 3305 | CATCCCAGCTTTGCTTCTG | 3306 | CAGAAGCAAAGCTGGGATG |
| 3307 | ATCCCAGCTTTGCTTCTGT | 3308 | ACAGAAGCAAAGCTGGGAT |
| 3309 | TCCCAGCTTTGCTTCTGTG | 3310 | CACAGAAGCAAAGCTGGGA |
| 3311 | CCCAGCTTTGCTTCTGTGC | 3312 | GCACAGAAGCAAAGCTGGG |
| 3313 | CCAGCTTTGCTTCTGTGCC | 3314 | GGCACAGAAGCAAAGCTGG |
| 3315 | CAGCTTTGCTTCTGTGCCT | 3316 | AGGCACAGAAGCAAAGCTG |
| 3317 | AGCTTTGCTTCTGTGCCTC | 3318 | GAGGCACAGAAGCAAAGCT |
| 3319 | GCTTTGCTTCTGTGCCTCC | 3320 | GGAGGCACAGAAGCAAAGC |
| 3321 | CTTTGCTTCTGTGCCTCCC | 3322 | GGGAGGCACAGAAGCAAAG |
| 3323 | TTTGCTTCTGTGCCTCCCG | 3324 | CGGGAGGCACAGAAGCAAA |
| 3325 | TTGCTTCTGTGCCTCCCGC | 3326 | GCGGGAGGCACAGAAGCAA |
| 3327 | TGCTTCTGTGCCTCCCGCT | 3328 | AGCGGGAGGCACAGAAGCA |
| 3329 | GCTTCTGTGCCTCCCGCTT | 3330 | AAGCGGGAGGCACAGAAGC |
| 3331 | CTTCTGTGCCTCCCGCTTC | 3332 | GAAGCGGGAGGCACAGAAG |
| 3333 | TTCTGTGCCTCCCGCTTCT | 3334 | AGAAGCGGGAGGCACAGAA |
| 3335 | TCTGTGCCTCCCGCTTCTG | 3336 | CAGAAGCGGGAGGCACAGA |
| 3337 | CTGTGCCTCCCGCTTCTGT | 3338 | ACAGAAGCGGGAGGCACAG |
| 3339 | TGTGCCTCCCGCTTCTGTT | 3340 | AACAGAAGCGGGAGGCACA |
| 3341 | GTGCCTCCCGCTTCTGTTC | 3342 | GAACAGAAGCGGGAGGCAC |
| 3343 | TGCCTCCCGCTTCTGTTCC | 3344 | GGAACAGAAGCGGGAGGCA |
| 3345 | GCCTCCCGCTTCTGTTCCT | 3346 | AGGAACAGAAGCGGGAGGC |
| 3347 | CCTCCCGCTTCTGTTCCTG | 3348 | CAGGAACAGAAGCGGGAGG |
| 3349 | CTCCCGCTTCTGTTCCTGC | 3350 | GCAGGAACAGAAGCGGGAG |
| 3351 | TCCCGCTTCTGTTCCTGCT | 3352 | AGCAGGAACAGAAGCGGGA |
| 3353 | CCCGCTTCTGTTCCTGCTG | 3354 | CAGCAGGAACAGAAGCGGG |
| 3355 | CCGCTTCTGTTCCTGCTGT | 3356 | ACAGCAGGAACAGAAGCGG |
| 3357 | CGCTTCTGTTCCTGCTGTT | 3358 | AACAGCAGGAACAGAAGCG |
| 3359 | GCTTCTGTTCCTGCTGTTC | 3360 | GAACAGCAGGAACAGAAGC |
| 3361 | CTTCTGTTCCTGCTGTTCG | 3362 | CGAACAGCAGGAACAGAAG |
| 3363 | TTCTGTTCCTGCTGTTCGG | 3364 | CCGAACAGCAGGAACAGAA |
| 3365 | TCTGTTCCTGCTGTTCGGC | 3366 | GCCGAACAGCAGGAACAGA |
| 3367 | CTGTTCCTGCTGTTCGGCT | 3368 | AGCCGAACAGCAGGAACAG |
| 3369 | TGTTCCTGCTGTTCGGCTG | 3370 | CAGCCGAACAGCAGGAACA |
| 3371 | GTTCCTGCTGTTCGGCTGG | 3372 | CCAGCCGAACAGCAGGAAC |
| 3373 | TTCCTGCTGTTCGGCTGGT | 3374 | ACCAGCCGAACAGCAGGAA |
| 3375 | TCCTGCTGTTCGGCTGGTC | 3376 | GACCAGCCGAACAGCAGGA |
| 3377 | CCTGCTGTTCGGCTGGTCC | 3378 | GGACCAGCCGAACAGCAGG |
| 3379 | CTGCTGTTCGGCTGGTCCC | 3380 | GGGACCAGCCGAACAGCAG |
| 3381 | TGCTGTTCGGCTGGTCCCG | 3382 | CGGGACCAGCCGAACAGCA |
| 3383 | GCTGTTCGGCTGGTCCCGG | 3384 | CCGGGACCAGCCGAACAGC |
| 3385 | CTGTTCGGCTGGTCCCGGG | 3386 | CCCGGGACCAGCCGAACAG |
| 3387 | TGTTCGGCTGGTCCCGGGC | 3388 | GCCCGGGACCAGCCGAACA |
| 3389 | GTTCGGCTGGTCCCGGGCT | 3390 | AGCCCGGGACCAGCCGAAC |
| 3391 | TTCGGCTGGTCCCGGGCTA | 3392 | TAGCCCGGGACCAGCCGAA |
| 3393 | TCGGCTGGTCCCGGGCTAG | 3394 | CTAGCCCGGGACCAGCCGA |
| 3395 | CGGCTGGTCCCGGGCTAGG | 3396 | CCTAGCCCGGGACCAGCCG |
| 3397 | GGCTGGTCCCGGGCTAGGC | 3398 | GCCTAGCCCGGGACCAGCC |
| 3399 | GCTGGTCCCGGGCTAGGCG | 3400 | CGCCTAGCCCGGGACCAGC |
| 3401 | CTGGTCCCGGGCTAGGCGA | 3402 | TCGCCTAGCCCGGGACCAG |
| 3403 | TGGTCCCGGGCTAGGCGAG | 3404 | CTCGCCTAGCCCGGGACCA |
| 3405 | GGTCCCGGGCTAGGCGAGA | 3406 | TCTCGCCTAGCCCGGGACC |
| 3407 | GTCCCGGGCTAGGCGAGAC | 3408 | GTCTCGCCTAGCCCGGGAC |
| 3409 | TCCCGGGCTAGGCGAGACG | 3410 | CGTCTCGCCTAGCCCGGGA |
| 3411 | CCCGGGCTAGGCGAGACGA | 3412 | TCGTCTCGCCTAGCCCGGG |
| 3413 | CCGGGCTAGGCGAGACGAC | 3414 | GTCGTCTCGCCTAGCCCGG |
| 3415 | CGGGCTAGGCGAGACGACC | 3416 | GGTCGTCTCGCCTAGCCCG |
| 3417 | GGGCTAGGCGAGACGACCC | 3418 | GGGTCGTCTCGCCTAGCCC |
| 3419 | GGCTAGGCGAGACGACCCT | 3420 | AGGGTCGTCTCGCCTAGCC |
| 3421 | GCTAGGCGAGACGACCCTC | 3422 | GAGGGTCGTCTCGCCTAGC |
| 3423 | CTAGGCGAGACGACCCTCA | 3424 | TGAGGGTCGTCTCGCCTAG |
| 3425 | TAGGCGAGACGACCCTCAC | 3426 | GTGAGGGTCGTCTCGCCTA |
| 3427 | AGGCGAGACGACCCTCACT | 3428 | AGTGAGGGTCGTCTCGCCT |
| 3429 | GGCGAGACGACCCTCACTC | 3430 | GAGTGAGGGTCGTCTCGCC |
| 3431 | GCGAGACGACCCTCACTCT | 3432 | AGAGTGAGGGTCGTCTCGC |
| 3433 | CGAGACGACCCTCACTCTC | 3434 | GAGAGTGAGGGTCGTCTCG |
| 3435 | GAGACGACCCTCACTCTCT | 3436 | AGAGAGTGAGGGTCGTCTC |
| 3437 | AGACGACCCTCACTCTCTT | 3438 | AAGAGAGTGAGGGTCGTCT |
| 3439 | GACGACCCTCACTCTCTTT | 3440 | AAAGAGAGTGAGGGTCGTC |
| 3441 | ACGACCCTCACTCTCTTTG | 3442 | CAAAGAGAGTGAGGGTCGT |
| 3443 | CGACCCTCACTCTCTTTGC | 3444 | GCAAAGAGAGTGAGGGTCG |
| 3445 | GACCCTCACTCTCTTTGCT | 3446 | AGCAAAGAGAGTGAGGGTC |
| 3447 | ACCCTCACTCTCTTTGCTA | 3448 | TAGCAAAGAGAGTGAGGGT |
| 3449 | CCCTCACTCTCTTTGCTAT | 3450 | ATAGCAAAGAGAGTGAGGG |
| 3451 | CCTCACTCTCTTTGCTATG | 3452 | CATAGCAAAGAGAGTGAGG |
| 3453 | CTCACTCTCTTTGCTATGA | 3454 | TCATAGCAAAGAGAGTGAG |
| 3455 | TCACTCTCTTTGCTATGAC | 3456 | GTCATAGCAAAGAGAGTGA |
| 3457 | CACTCTCTTTGCTATGACA | 3458 | TGTCATAGCAAAGAGAGTG |
| 3459 | ACTCTCTTTGCTATGACAT | 3460 | ATGTCATAGCAAAGAGAGT |
| 3461 | CTCTCTTTGCTATGACATC | 3462 | GATGTCATAGCAAAGAGAG |
| 3463 | TCTCTTTGCTATGACATCA | 3464 | TGATGTCATAGCAAAGAGA |
| 3465 | CTCTTTGCTATGACATCAC | 3466 | GTGATGTCATAGCAAAGAG |
| 3467 | TCTTTGCTATGACATCACC | 3468 | GGTGATGTCATAGCAAAGA |
| 3469 | CTTTGCTATGACATCACCG | 3470 | CGGTGATGTCATAGCAAAG |
| 3471 | TTTGCTATGACATCACCGT | 3472 | ACGGTGATGTCATAGCAAA |
| 3473 | TTGCTATGACATCACCGTC | 3474 | GACGGTGATGTCATAGCAA |
| 3475 | TGCTATGACATCACCGTCA | 3476 | TGACGGTGATGTCATAGCA |
| 3477 | GCTATGACATCACCGTCAT | 3478 | ATGACGGTGATGTCATAGC |
| 3479 | CTATGACATCACCGTCATC | 3480 | GATGACGGTGATGTCATAG |
| 3481 | TATGACATCACCGTCATCC | 3482 | GGATGACGGTGATGTCATA |
| 3483 | ATGACATCACCGTCATCCC | 3484 | GGGATGACGGTGATGTCAT |
| 3485 | TGACATCACCGTCATCCCT | 3486 | AGGGATGACGGTGATGTCA |
| 3487 | GACATCACCGTCATCCCTA | 3488 | TAGGGATGACGGTGATGTC |
| 3489 | ACATCACCGTCATCCCTAA | 3490 | TTAGGGATGACGGTGATGT |
| 3491 | CATCACCGTCATCCCTAAG | 3492 | CTTAGGGATGACGGTGATG |
| 3493 | ATCACCGTCATCCCTAAGT | 3494 | ACTTAGGGATGACGGTGAT |
| 3495 | TCACCGTCATCCCTAAGTT | 3496 | AACTTAGGGATGACGGTGA |
| 3497 | CACCGTCATCCCTAAGTTC | 3498 | GAACTTAGGGATGACGGTG |
| 3499 | ACCGTCATCCCTAAGTTCA | 3500 | TGAACTTAGGGATGACGGT |
| 3501 | CCGTCATCCCTAAGTTCAG | 3502 | CTGAACTTAGGGATGACGG |
| 3503 | CGTCATCCCTAAGTTCAGA | 3504 | TCTGAACTTAGGGATGACG |
| 3505 | GTCATCCCTAAGTTCAGAC | 3506 | GTCTGAACTTAGGGATGAC |
| 3507 | TCATCCCTAAGTTCAGACC | 3508 | GGTCTGAACTTAGGGATGA |
| 3509 | CATCCCTAAGTTCAGACCT | 3510 | AGGTCTGAACTTAGGGATG |
| 3511 | ATCCCTAAGTTCAGACCTG | 3512 | CAGGTCTGAACTTAGGGAT |
| 3513 | TCCCTAAGTTCAGACCTGG | 3514 | CCAGGTCTGAACTTAGGGA |
| 3515 | CCCTAAGTTCAGACCTGGA | 3516 | TCCAGGTCTGAACTTAGGG |
| 3517 | CCTAAGTTCAGACCTGGAC | 3518 | GTCCAGGTCTGAACTTAGG |
| 3519 | CTAAGTTCAGACCTGGACC | 3520 | GGTCCAGGTCTGAACTTAG |
| 3521 | TAAGTTCAGACCTGGACCA | 3522 | TGGTCCAGGTCTGAACTTA |
| 3523 | AAGTTCAGACCTGGACCAC | 3524 | GTGGTCCAGGTCTGAACTT |
| 3525 | AGTTCAGACCTGGACCACG | 3526 | CGTGGTCCAGGTCTGAACT |
| 3527 | GTTCAGACCTGGACCACGG | 3528 | CCGTGGTCCAGGTCTGAAC |
| 3529 | TTCAGACCTGGACCACGGT | 3530 | ACCGTGGTCCAGGTCTGAA |
| 3531 | TCAGACCTGGACCACGGTG | 3532 | CACCGTGGTCCAGGTCTGA |
| 3533 | CAGACCTGGACCACGGTGG | 3534 | CCACCGTGGTCCAGGTCTG |
| 3535 | AGACCTGGACCACGGTGGT | 3536 | ACCACCGTGGTCCAGGTCT |
| 3537 | GACCTGGACCACGGTGGTG | 3538 | CACCACCGTGGTCCAGGTC |
| 3539 | ACCTGGACCACGGTGGTGT | 3540 | ACACCACCGTGGTCCAGGT |
| 3541 | CCTGGACCACGGTGGTGTG | 3542 | CACACCACCGTGGTCCAGG |
| 3543 | CTGGACCACGGTGGTGTGC | 3544 | GCACACCACCGTGGTCCAG |
| 3545 | TGGACCACGGTGGTGTGCG | 3546 | CGCACACCACCGTGGTCCA |
| 3547 | GGACCACGGTGGTGTGCGG | 3548 | CCGCACACCACCGTGGTCC |
| 3549 | GACCACGGTGGTGTGCGGT | 3550 | ACCGCACACCACCGTGGTC |
| 3551 | ACCACGGTGGTGTGCGGTT | 3552 | AACCGCACACCACCGTGGT |
| 3553 | CCACGGTGGTGTGCGGTTC | 3554 | GAACCGCACACCACCGTGG |
| 3555 | CACGGTGGTGTGCGGTTCA | 3556 | TGAACCGCACACCACCGTG |
| 3557 | ACGGTGGTGTGCGGTTCAA | 3558 | TTGAACCGCACACCACCGT |
| 3559 | CGGTGGTGTGCGGTTCAAG | 3560 | CTTGAACCGCACACCACCG |
| 3561 | GGTGGTGTGCGGTTCAAGG | 3562 | CCTTGAACCGCACACCACC |
| 3563 | GTGGTGTGCGGTTCAAGGC | 3564 | GCCTTGAACCGCACACCAC |
| 3565 | TGGTGTGCGGTTCAAGGCC | 3566 | GGCCTTGAACCGCACACCA |
| 3567 | GGTGTGCGGTTCAAGGCCA | 3568 | TGGCCTTGAACCGCACACC |
| 3569 | GTGTGCGGTTCAAGGCCAG | 3570 | CTGGCCTTGAACCGCACAC |
| 3571 | TGTGCGGTTCAAGGCCAGG | 3572 | CCTGGCCTTGAACCGCACA |
| 3573 | GTGCGGTTCAAGGCCAGGT | 3574 | ACCTGGCCTTGAACCGCAC |
| 3575 | TGCGGTTCAAGGCCAGGTG | 3576 | CACCTGGCCTTGAACCGCA |
| 3577 | GCGGTTCAAGGCCAGGTGG | 3578 | CCACCTGGCCTTGAACCGC |
| 3579 | CGGTTCAAGGCCAGGTGGA | 3580 | TCCACCTGGCCTTGAACCG |
| 3581 | GGTTCAAGGCCAGGTGGAT | 3582 | ATCCACCTGGCCTTGAACC |
| 3583 | GTTCAAGGCCAGGTGGATG | 3584 | CATCCACCTGGCCTTGAAC |
| 3585 | TTCAAGGCCAGGTGGATGA | 3586 | TCATCCACCTGGCCTTGAA |
| 3587 | TCAAGGCCAGGTGGATGAA | 3588 | TTCATCCACCTGGCCTTGA |
| 3589 | CAAGGCCAGGTGGATGAAA | 3590 | TTTCATCCACCTGGCCTTG |
| 3591 | AAGGCCAGGTGGATGAAAA | 3592 | TTTTCATCCACCTGGCCTT |
| 3593 | AGGCCAGGTGGATGAAAAG | 3594 | CTTTTCATCCACCTGGCCT |
| 3595 | GGCCAGGTGGATGAAAAGA | 3596 | TCTTTTCATCCACCTGGCC |
| 3597 | GCCAGGTGGATGAAAAGAC | 3598 | GTCTTTTCATCCACCTGGC |
| 3599 | CCAGGTGGATGAAAAGACT | 3600 | AGTCTTTTCATCCACCTGG |
| 3601 | CAGGTGGATGAAAAGACTT | 3602 | AAGTCTTTTCATCCACCTG |
| 3603 | AGGTGGATGAAAAGACTTT | 3604 | AAAGTCTTTTCATCCACCT |
| 3605 | GGTGGATGAAAAGACTTTT | 3606 | AAAAGTCTTTTCATCCACC |
| 3607 | GTGGATGAAAAGACTTTTC | 3608 | GAAAAGTCTTTTCATCCAC |
| 3609 | TGGATGAAAAGACTTTTCT | 3610 | AGAAAAGTCTTTTCATCCA |
| 3611 | GGATGAAAAGACTTTTCTT | 3612 | AAGAAAAGTCTTTTCATCC |
| 3613 | GATGAAAAGACTTTTCTTC | 3614 | GAAGAAAAGTCTTTTCATC |
| 3615 | ATGAAAAGACTTTTCTTCA | 3616 | TGAAGAAAAGTCTTTTCAT |
| 3617 | TGAAAAGACTTTTCTTCAC | 3618 | GTGAAGAAAAGTCTTTTCA |
| 3619 | GAAAAGACTTTTCTTCACT | 3620 | AGTGAAGAAAAGTCTTTTC |
| 3621 | AAAAGACTTTTCTTCACTA | 3622 | TAGTGAAGAAAAGTCTTTT |
| 3623 | AAAGACTTTTCTTCACTAT | 3624 | ATAGTGAAGAAAAGTCTTT |
| 3625 | AAGACTTTTCTTCACTATG | 3626 | CATAGTGAAGAAAAGTCTT |
| 3627 | AGACTTTTCTTCACTATGA | 3628 | TCATAGTGAAGAAAAGTCT |
| 3629 | GACTTTTCTTCACTATGAC | 3630 | GTCATAGTGAAGAAAAGTC |
| 3631 | ACTTTTCTTCACTATGACT | 3632 | AGTCATAGTGAAGAAAAGT |
| 3633 | CTTTTCTTCACTATGACTG | 3634 | CAGTCATAGTGAAGAAAAG |
| 3635 | TTTTCTTCACTATGACTGT | 3636 | ACAGTCATAGTGAAGAAAA |
| 3637 | TTTCTTCACTATGACTGTG | 3638 | CACAGTCATAGTGAAGAAA |
| 3639 | TTCTTCACTATGACTGTGG | 3640 | CCACAGTCATAGTGAAGAA |
| 3641 | TCTTCACTATGACTGTGGC | 3642 | GCCACAGTCATAGTGAAGA |
| 3643 | CTTCACTATGACTGTGGCA | 3644 | TGCCACAGTCATAGTGAAG |
| 3645 | TTCACTATGACTGTGGCAA | 3646 | TTGCCACAGTCATAGTGAA |
| 3647 | TCACTATGACTGTGGCAAC | 3648 | GTTGCCACAGTCATAGTGA |
| 3649 | CACTATGACTGTGGCAACA | 3650 | TGTTGCCACAGTCATAGTG |
| 3651 | ACTATGACTGTGGCAACAA | 3652 | TTGTTGCCACAGTCATAGT |
| 3653 | CTATGACTGTGGCAACAAG | 3654 | CTTGTTGCCACAGTCATAG |
| 3655 | TATGACTGTGGCAACAAGA | 3656 | TCTTGTTGCCACAGTCATA |
| 3657 | ATGACTGTGGCAACAAGAC | 3658 | GTCTTGTTGCCACAGTCAT |
| 3659 | TGACTGTGGCAACAAGACA | 3660 | TGTCTTGTTGCCACAGTCA |
| 3661 | GACTGTGGCAACAAGACAG | 3662 | CTGTCTTGTTGCCACAGTC |
| 3663 | ACTGTGGCAACAAGACAGT | 3664 | ACTGTCTTGTTGCCACAGT |
| 3665 | CTGTGGCAACAAGACAGTC | 3666 | GACTGTCTTGTTGCCACAG |
| 3667 | TGTGGCAACAAGACAGTCA | 3668 | TGACTGTCTTGTTGCCACA |
| 3669 | GTGGCAACAAGACAGTCAC | 3670 | GTGACTGTCTTGTTGCCAC |
| 3671 | TGGCAACAAGACAGTCACA | 3672 | TGTGACTGTCTTGTTGCCA |
| 3673 | GGCAACAAGACAGTCACAC | 3674 | GTGTGACTGTCTTGTTGCC |
| 3675 | GCAACAAGACAGTCACACC | 3676 | GGTGTGACTGTCTTGTTGC |
| 3677 | CAACAAGACAGTCACACCC | 3678 | GGGTGTGACTGTCTTGTTG |
| 3679 | AACAAGACAGTCACACCCG | 3680 | CGGGTGTGACTGTCTTGTT |
| 3681 | ACAAGACAGTCACACCCGT | 3682 | ACGGGTGTGACTGTCTTGT |
| 3683 | CAAGACAGTCACACCCGTC | 3684 | GACGGGTGTGACTGTCTTG |
| 3685 | AAGACAGTCACACCCGTCA | 3686 | TGACGGGTGTGACTGTCTT |
| 3687 | AGACAGTCACACCCGTCAG | 3688 | CTGACGGGTGTGACTGTCT |
| 3689 | GACAGTCACACCCGTCAGT | 3690 | ACTGACGGGTGTGACTGTC |
| 3691 | ACAGTCACACCCGTCAGTC | 3692 | GACTGACGGGTGTGACTGT |
| 3693 | CAGTCACACCCGTCAGTCC | 3694 | GGACTGACGGGTGTGACTG |
| 3695 | AGTCACACCCGTCAGTCCC | 3696 | GGGACTGACGGGTGTGACT |
| 3697 | GTCACACCCGTCAGTCCCC | 3698 | GGGGACTGACGGGTGTGAC |
| 3699 | TCACACCCGTCAGTCCCCT | 3700 | AGGGGACTGACGGGTGTGA |
| 3701 | CACACCCGTCAGTCCCCTG | 3702 | CAGGGGACTGACGGGTGTG |
| 3703 | ACACCCGTCAGTCCCCTGG | 3704 | CCAGGGGACTGACGGGTGT |
| 3705 | CACCCGTCAGTCCCCTGGG | 3706 | CCCAGGGGACTGACGGGTG |
| 3707 | ACCCGTCAGTCCCCTGGGG | 3708 | CCCCAGGGGACTGACGGGT |
| 3709 | CCCGTCAGTCCCCTGGGGA | 3710 | TCCCCAGGGGACTGACGGG |
| 3711 | CCGTCAGTCCCCTGGGGAA | 3712 | TTCCCCAGGGGACTGACGG |
| 3713 | CGTCAGTCCCCTGGGGAAG | 3714 | CTTCCCCAGGGGACTGACG |
| 3715 | GTCAGTCCCCTGGGGAAGA | 3716 | TCTTCCCCAGGGGACTGAC |
| 3717 | TCAGTCCCCTGGGGAAGAA | 3718 | TTCTTCCCCAGGGGACTGA |
| 3719 | CAGTCCCCTGGGGAAGAAA | 3720 | TTTCTTCCCCAGGGGACTG |
| 3721 | AGTCCCCTGGGGAAGAAAC | 3722 | GTTTCTTCCCCAGGGGACT |
| 3723 | GTCCCCTGGGGAAGAAACT | 3724 | AGTTTCTTCCCCAGGGGAC |
| 3725 | TCCCCTGGGGAAGAAACTA | 3726 | TAGTTTCTTCCCCAGGGGA |
| 3727 | CCCCTGGGGAAGAAACTAA | 3728 | TTAGTTTCTTCCCCAGGGG |
| 3729 | CCCTGGGGAAGAAACTAAA | 3730 | TTTAGTTTCTTCCCCAGGG |
| 3731 | CCTGGGGAAGAAACTAAAT | 3732 | ATTTAGTTTCTTCCCCAGG |
| 3733 | CTGGGGAAGAAACTAAATG | 3734 | CATTTAGTTTCTTCCCCAG |
| 3735 | TGGGGAAGAAACTAAATGT | 3736 | ACATTTAGTTTCTTCCCCA |
| 3737 | GGGGAAGAAACTAAATGTC | 3738 | GACATTTAGTTTCTTCCCC |
| 3739 | GGGAAGAAACTAAATGTCA | 3740 | TGACATTTAGTTTCTTCCC |
| 3741 | GGAAGAAACTAAATGTCAC | 3742 | GTGACATTTAGTTTCTTCC |
| 3743 | GAAGAAACTAAATGTCACA | 3744 | TGTGACATTTAGTTTCTTC |
| 3745 | AAGAAACTAAATGTCACAA | 3746 | TTGTGACATTTAGTTTCTT |
| 3747 | AGAAACTAAATGTCACAAT | 3748 | ATTGTGACATTTAGTTTCT |
| 3749 | GAAACTAAATGTCACAATG | 3750 | CATTGTGACATTTAGTTTC |
| 3751 | AAACTAAATGTCACAATGG | 3752 | CCATTGTGACATTTAGTTT |
| 3753 | AACTAAATGTCACAATGGC | 3754 | GCCATTGTGACATTTAGTT |
| 3755 | ACTAAATGTCACAATGGCC | 3756 | GGCCATTGTGACATTTAGT |
| 3757 | CTAAATGTCACAATGGCCT | 3758 | AGGCCATTGTGACATTTAG |
| 3759 | TAAATGTCACAATGGCCTG | 3760 | CAGGCCATTGTGACATTTA |
| 3761 | AAATGTCACAATGGCCTGG | 3762 | CCAGGCCATTGTGACATTT |
| 3763 | AATGTCACAATGGCCTGGA | 3764 | TCCAGGCCATTGTGACATT |
| 3765 | ATGTCACAATGGCCTGGAA | 3766 | TTCCAGGCCATTGTGACAT |
| 3767 | TGTCACAATGGCCTGGAAA | 3768 | TTTCCAGGCCATTGTGACA |
| 3769 | GTCACAATGGCCTGGAAAG | 3770 | CTTTCCAGGCCATTGTGAC |
| 3771 | TCACAATGGCCTGGAAAGC | 3772 | GCTTTCCAGGCCATTGTGA |
| 3773 | CACAATGGCCTGGAAAGCA | 3774 | TGCTTTCCAGGCCATTGTG |
| 3775 | ACAATGGCCTGGAAAGCAC | 3776 | GTGCTTTCCAGGCCATTGT |
| 3777 | CAATGGCCTGGAAAGCACA | 3778 | TGTGCTTTCCAGGCCATTG |
| 3779 | AATGGCCTGGAAAGCACAG | 3780 | CTGTGCTTTCCAGGCCATT |
| 3781 | ATGGCCTGGAAAGCACAGA | 3782 | TCTGTGCTTTCCAGGCCAT |
| 3783 | TGGCCTGGAAAGCACAGAA | 3784 | TTCTGTGCTTTCCAGGCCA |
| 3785 | GGCCTGGAAAGCACAGAAC | 3786 | GTTCTGTGCTTTCCAGGCC |
| 3787 | GCCTGGAAAGCACAGAACC | 3788 | GGTTCTGTGCTTTCCAGGC |
| 3789 | CCTGGAAAGCACAGAACCC | 3790 | GGGTTCTGTGCTTTCCAGG |
| 3791 | CTGGAAAGCACAGAACCCA | 3792 | TGGGTTCTGTGCTTTCCAG |
| 3793 | TGGAAAGCACAGAACCCAG | 3794 | CTGGGTTCTGTGCTTTCCA |
| 3795 | GGAAAGCACAGAACCCAGT | 3796 | ACTGGGTTCTGTGCTTTCC |
| 3797 | GAAAGCACAGAACCCAGTA | 3798 | TACTGGGTTCTGTGCTTTC |
| 3799 | AAAGCACAGAACCCAGTAC | 3800 | GTACTGGGTTCTGTGCTTT |
| 3801 | AAGCACAGAACCCAGTACT | 3802 | AGTACTGGGTTCTGTGCTT |
| 3803 | AGCACAGAACCCAGTACTG | 3804 | CAGTACTGGGTTCTGTGCT |
| 3805 | GCACAGAACCCAGTACTGA | 3806 | TCAGTACTGGGTTCTGTGC |
| 3807 | CACAGAACCCAGTACTGAG | 3808 | CTCAGTACTGGGTTCTGTG |
| 3809 | ACAGAACCCAGTACTGAGA | 3810 | TCTCAGTACTGGGTTCTGT |
| 3811 | CAGAACCCAGTACTGAGAG | 3812 | CTCTCAGTACTGGGTTCTG |
| 3813 | AGAACCCAGTACTGAGAGA | 3814 | TCTCTCAGTACTGGGTTCT |
| 3815 | GAACCCAGTACTGAGAGAG | 3816 | CTCTCTCAGTACTGGGTTC |
| 3817 | AACCCAGTACTGAGAGAGG | 3818 | CCTCTCTCAGTACTGGGTT |
| 3819 | ACCCAGTACTGAGAGAGGT | 3820 | ACCTCTCTCAGTACTGGGT |
| 3821 | CCCAGTACTGAGAGAGGTG | 3822 | CACCTCTCTCAGTACTGGG |
| 3823 | CCAGTACTGAGAGAGGTGG | 3824 | CCACCTCTCTCAGTACTGG |
| 3825 | CAGTACTGAGAGAGGTGGT | 3826 | ACCACCTCTCTCAGTACTG |
| 3827 | AGTACTGAGAGAGGTGGTG | 3828 | CACCACCTCTCTCAGTACT |
| 3829 | GTACTGAGAGAGGTGGTGG | 3830 | CCACCACCTCTCTCAGTAC |
| 3831 | TACTGAGAGAGGTGGTGGA | 3832 | TCCACCACCTCTCTCAGTA |
| 3833 | ACTGAGAGAGGTGGTGGAC | 3834 | GTCCACCACCTCTCTCAGT |
| 3835 | CTGAGAGAGGTGGTGGACA | 3836 | TGTCCACCACCTCTCTCAG |
| 3837 | TGAGAGAGGTGGTGGACAT | 3838 | ATGTCCACCACCTCTCTCA |
| 3839 | GAGAGAGGTGGTGGACATA | 3840 | TATGTCCACCACCTCTCTC |
| 3841 | AGAGAGGTGGTGGACATAC | 3842 | GTATGTCCACCACCTCTCT |
| 3843 | GAGAGGTGGTGGACATACT | 3844 | AGTATGTCCACCACCTCTC |
| 3845 | AGAGGTGGTGGACATACTT | 3846 | AAGTATGTCCACCACCTCT |
| 3847 | GAGGTGGTGGACATACTTA | 3848 | TAAGTATGTCCACCACCTC |
| 3849 | AGGTGGTGGACATACTTAC | 3850 | GTAAGTATGTCCACCACCT |
| 3851 | GGTGGTGGACATACTTACA | 3852 | TGTAAGTATGTCCACCACC |
| 3853 | GTGGTGGACATACTTACAG | 3854 | CTGTAAGTATGTCCACCAC |
| 3855 | TGGTGGACATACTTACAGA | 3856 | TCTGTAAGTATGTCCACCA |
| 3857 | GGTGGACATACTTACAGAG | 3858 | CTCTGTAAGTATGTCCACC |
| 3859 | GTGGACATACTTACAGAGC | 3860 | GCTCTGTAAGTATGTCCAC |
| 3861 | TGGACATACTTACAGAGCA | 3862 | TGCTCTGTAAGTATGTCCA |
| 3863 | GGACATACTTACAGAGCAA | 3864 | TTGCTCTGTAAGTATGTCC |
| 3865 | GACATACTTACAGAGCAAC | 3866 | GTTGCTCTGTAAGTATGTC |
| 3867 | ACATACTTACAGAGCAACT | 3868 | AGTTGCTCTGTAAGTATGT |
| 3869 | CATACTTACAGAGCAACTG | 3870 | CAGTTGCTCTGTAAGTATG |
| 3871 | ATACTTACAGAGCAACTGC | 3872 | GCAGTTGCTCTGTAAGTAT |
| 3873 | TACTTACAGAGCAACTGCT | 3874 | AGCAGTTGCTCTGTAAGTA |
| 3875 | ACTTACAGAGCAACTGCTT | 3876 | AAGCAGTTGCTCTGTAAGT |
| 3877 | CTTACAGAGCAACTGCTTG | 3878 | CAAGCAGTTGCTCTGTAAG |
| 3879 | TTACAGAGCAACTGCTTGA | 3880 | TCAAGCAGTTGCTCTGTAA |
| 3881 | TACAGAGCAACTGCTTGAC | 3882 | GTCAAGCAGTTGCTCTGTA |
| 3883 | ACAGAGCAACTGCTTGACA | 3884 | TGTCAAGCAGTTGCTCTGT |
| 3885 | CAGAGCAACTGCTTGACAT | 3886 | ATGTCAAGCAGTTGCTCTG |
| 3887 | AGAGCAACTGCTTGACATT | 3888 | AATGTCAAGCAGTTGCTCT |
| 3889 | GAGCAACTGCTTGACATTC | 3890 | GAATGTCAAGCAGTTGCTC |
| 3891 | AGCAACTGCTTGACATTCA | 3892 | TGAATGTCAAGCAGTTGCT |
| 3893 | GCAACTGCTTGACATTCAG | 3894 | CTGAATGTCAAGCAGTTGC |
| 3895 | CAACTGCTTGACATTCAGC | 3896 | GCTGAATGTCAAGCAGTTG |
| 3897 | AACTGCTTGACATTCAGCT | 3898 | AGCTGAATGTCAAGCAGTT |
| 3899 | ACTGCTTGACATTCAGCTG | 3900 | CAGCTGAATGTCAAGCAGT |
| 3901 | CTGCTTGACATTCAGCTGG | 3902 | CCAGCTGAATGTCAAGCAG |
| 3903 | TGCTTGACATTCAGCTGGA | 3904 | TCCAGCTGAATGTCAAGCA |
| 3905 | GCTTGACATTCAGCTGGAG | 3906 | CTCCAGCTGAATGTCAAGC |
| 3907 | CTTGACATTCAGCTGGAGA | 3908 | TCTCCAGCTGAATGTCAAG |
| 3909 | TTGACATTCAGCTGGAGAA | 3910 | TTCTCCAGCTGAATGTCAA |
| 3911 | TGACATTCAGCTGGAGAAT | 3912 | ATTCTCCAGCTGAATGTCA |
| 3913 | GACATTCAGCTGGAGAATT | 3914 | AATTCTCCAGCTGAATGTC |
| 3915 | ACATTCAGCTGGAGAATTA | 3916 | TAATTCTCCAGCTGAATGT |
| 3917 | CATTCAGCTGGAGAATTAC | 3918 | GTAATTCTCCAGCTGAATG |
| 3919 | ATTCAGCTGGAGAATTACA | 3920 | TGTAATTCTCCAGCTGAAT |
| 3921 | TTCAGCTGGAGAATTACAC | 3922 | GTGTAATTCTCCAGCTGAA |
| 3923 | TCAGCTGGAGAATTACACA | 3924 | TGTGTAATTCTCCAGCTGA |
| 3925 | CAGCTGGAGAATTACACAC | 3926 | GTGTGTAATTCTCCAGCTG |
| 3927 | AGCTGGAGAATTACACACC | 3928 | GGTGTGTAATTCTCCAGCT |
| 3929 | GCTGGAGAATTACACACCC | 3930 | GGGTGTGTAATTCTCCAGC |
| 3931 | CTGGAGAATTACACACCCA | 3932 | TGGGTGTGTAATTCTCCAG |
| 3933 | TGGAGAATTACACACCCAA | 3934 | TTGGGTGTGTAATTCTCCA |
| 3935 | GGAGAATTACACACCCAAG | 3936 | CTTGGGTGTGTAATTCTCC |
| 3937 | GAGAATTACACACCCAAGG | 3938 | CCTTGGGTGTGTAATTCTC |
| 3939 | AGAATTACACACCCAAGGA | 3940 | TCCTTGGGTGTGTAATTCT |
| 3941 | GAATTACACACCCAAGGAA | 3942 | TTCCTTGGGTGTGTAATTC |
| 3943 | AATTACACACCCAAGGAAC | 3944 | GTTCCTTGGGTGTGTAATT |
| 3945 | ATTACACACCCAAGGAACC | 3946 | GGTTCCTTGGGTGTGTAAT |
| 3947 | TTACACACCCAAGGAACCC | 3948 | GGGTTCCTTGGGTGTGTAA |
| 3949 | TACACACCCAAGGAACCCC | 3950 | GGGGTTCCTTGGGTGTGTA |
| 3951 | ACACACCCAAGGAACCCCT | 3952 | AGGGGTTCCTTGGGTGTGT |
| 3953 | CACACCCAAGGAACCCCTC | 3954 | GAGGGGTTCCTTGGGTGTG |
| 3955 | ACACCCAAGGAACCCCTCA | 3956 | TGAGGGGTTCCTTGGGTGT |
| 3957 | CACCCAAGGAACCCCTCAC | 3958 | GTGAGGGGTTCCTTGGGTG |
| 3959 | ACCCAAGGAACCCCTCACC | 3960 | GGTGAGGGGTTCCTTGGGT |
| 3961 | CCCAAGGAACCCCTCACCC | 3962 | GGGTGAGGGGTTCCTTGGG |
| 3963 | CCAAGGAACCCCTCACCCT | 3964 | AGGGTGAGGGGTTCCTTGG |
| 3965 | CAAGGAACCCCTCACCCTG | 3966 | CAGGGTGAGGGGTTCCTTG |
| 3967 | AAGGAACCCCTCACCCTGC | 3968 | GCAGGGTGAGGGGTTCCTT |
| 3969 | AGGAACCCCTCACCCTGCA | 3970 | TGCAGGGTGAGGGGTTCCT |
| 3971 | GGAACCCCTCACCCTGCAG | 3972 | CTGCAGGGTGAGGGGTTCC |
| 3973 | GAACCCCTCACCCTGCAGG | 3974 | CCTGCAGGGTGAGGGGTTC |
| 3975 | AACCCCTCACCCTGCAGGC | 3976 | GCCTGCAGGGTGAGGGGTT |
| 3977 | ACCCCTCACCCTGCAGGCA | 3978 | TGCCTGCAGGGTGAGGGGT |
| 3979 | CCCCTCACCCTGCAGGCAA | 3980 | TTGCCTGCAGGGTGAGGGG |
| 3981 | CCCTCACCCTGCAGGCAAG | 3982 | CTTGCCTGCAGGGTGAGGG |
| 3983 | CCTCACCCTGCAGGCAAGG | 3984 | CCTTGCCTGCAGGGTGAGG |
| 3985 | CTCACCCTGCAGGCAAGGA | 3986 | TCCTTGCCTGCAGGGTGAG |
| 3987 | TCACCCTGCAGGCAAGGAT | 3988 | ATCCTTGCCTGCAGGGTGA |
| 3989 | CACCCTGCAGGCAAGGATG | 3990 | CATCCTTGCCTGCAGGGTG |
| 3991 | ACCCTGCAGGCAAGGATGT | 3992 | ACATCCTTGCCTGCAGGGT |
| 3993 | CCCTGCAGGCAAGGATGTC | 3994 | GACATCCTTGCCTGCAGGG |
| 3995 | CCTGCAGGCAAGGATGTCT | 3996 | AGACATCCTTGCCTGCAGG |
| 3997 | CTGCAGGCAAGGATGTCTT | 3998 | AAGACATCCTTGCCTGCAG |
| 3999 | TGCAGGCAAGGATGTCTTG | 4000 | CAAGACATCCTTGCCTGCA |
| 4001 | GCAGGCAAGGATGTCTTGT | 4002 | ACAAGACATCCTTGCCTGC |
| 4003 | CAGGCAAGGATGTCTTGTG | 4004 | CACAAGACATCCTTGCCTG |
| 4005 | AGGCAAGGATGTCTTGTGA | 4006 | TCACAAGACATCCTTGCCT |
| 4007 | GGCAAGGATGTCTTGTGAG | 4008 | CTCACAAGACATCCTTGCC |
| 4009 | GCAAGGATGTCTTGTGAGC | 4010 | GCTCACAAGACATCCTTGC |
| 4011 | CAAGGATGTCTTGTGAGCA | 4012 | TGCTCACAAGACATCCTTG |
| 4013 | AAGGATGTCTTGTGAGCAG | 4014 | CTGCTCACAAGACATCCTT |
| 4015 | AGGATGTCTTGTGAGCAGA | 4016 | TCTGCTCACAAGACATCCT |
| 4017 | GGATGTCTTGTGAGCAGAA | 4018 | TTCTGCTCACAAGACATCC |
| 4019 | GATGTCTTGTGAGCAGAAA | 4020 | TTTCTGCTCACAAGACATC |
| 4021 | ATGTCTTGTGAGCAGAAAG | 4022 | CTTTCTGCTCACAAGACAT |
| 4023 | TGTCTTGTGAGCAGAAAGC | 4024 | GCTTTCTGCTCACAAGACA |
| 4025 | GTCTTGTGAGCAGAAAGCT | 4026 | AGCTTTCTGCTCACAAGAC |
| 4027 | TCTTGTGAGCAGAAAGCTG | 4028 | CAGCTTTCTGCTCACAAGA |
| 4029 | CTTGTGAGCAGAAAGCTGA | 4030 | TCAGCTTTCTGCTCACAAG |
| 4031 | TTGTGAGCAGAAAGCTGAA | 4032 | TTCAGCTTTCTGCTCACAA |
| 4033 | TGTGAGCAGAAAGCTGAAG | 4034 | CTTCAGCTTTCTGCTCACA |
| 4035 | GTGAGCAGAAAGCTGAAGG | 4036 | CCTTCAGCTTTCTGCTCAC |
| 4037 | TGAGCAGAAAGCTGAAGGA | 4038 | TCCTTCAGCTTTCTGCTCA |
| 4039 | GAGCAGAAAGCTGAAGGAC | 4040 | GTCCTTCAGCTTTCTGCTC |
| 4041 | AGCAGAAAGCTGAAGGACA | 4042 | TGTCCTTCAGCTTTCTGCT |
| 4043 | GCAGAAAGCTGAAGGACAC | 4044 | GTGTCCTTCAGCTTTCTGC |
| 4045 | CAGAAAGCTGAAGGACACA | 4046 | TGTGTCCTTCAGCTTTCTG |
| 4047 | AGAAAGCTGAAGGACACAG | 4048 | CTGTGTCCTTCAGCTTTCT |
| 4049 | GAAAGCTGAAGGACACAGC | 4050 | GCTGTGTCCTTCAGCTTTC |
| 4051 | AAAGCTGAAGGACACAGCA | 4052 | TGCTGTGTCCTTCAGCTTT |
| 4053 | AAGCTGAAGGACACAGCAG | 4054 | CTGCTGTGTCCTTCAGCTT |
| 4055 | AGCTGAAGGACACAGCAGT | 4056 | ACTGCTGTGTCCTTCAGCT |
| 4057 | GCTGAAGGACACAGCAGTG | 4058 | CACTGCTGTGTCCTTCAGC |
| 4059 | CTGAAGGACACAGCAGTGG | 4060 | CCACTGCTGTGTCCTTCAG |
| 4061 | TGAAGGACACAGCAGTGGA | 4062 | TCCACTGCTGTGTCCTTCA |
| 4063 | GAAGGACACAGCAGTGGAT | 4064 | ATCCACTGCTGTGTCCTTC |
| 4065 | AAGGACACAGCAGTGGATC | 4066 | GATCCACTGCTGTGTCCTT |
| 4067 | AGGACACAGCAGTGGATCT | 4068 | AGATCCACTGCTGTGTCCT |
| 4069 | GGACACAGCAGTGGATCTT | 4070 | AAGATCCACTGCTGTGTCC |
| 4071 | GACACAGCAGTGGATCTTG | 4072 | CAAGATCCACTGCTGTGTC |
| 4073 | ACACAGCAGTGGATCTTGG | 4074 | CCAAGATCCACTGCTGTGT |
| 4075 | CACAGCAGTGGATCTTGGC | 4076 | GCCAAGATCCACTGCTGTG |
| 4077 | ACAGCAGTGGATCTTGGCA | 4078 | TGCCAAGATCCACTGCTGT |
| 4079 | CAGCAGTGGATCTTGGCAG | 4080 | CTGCCAAGATCCACTGCTG |
| 4081 | AGCAGTGGATCTTGGCAGT | 4082 | ACTGCCAAGATCCACTGCT |
| 4083 | GCAGTGGATCTTGGCAGTT | 4084 | AACTGCCAAGATCCACTGC |
| 4085 | CAGTGGATCTTGGCAGTTC | 4086 | GAACTGCCAAGATCCACTG |
| 4087 | AGTGGATCTTGGCAGTTCA | 4088 | TGAACTGCCAAGATCCACT |
| 4089 | GTGGATCTTGGCAGTTCAG | 4090 | CTGAACTGCCAAGATCCAC |
| 4091 | TGGATCTTGGCAGTTCAGT | 4092 | ACTGAACTGCCAAGATCCA |
| 4093 | GGATCTTGGCAGTTCAGTA | 4094 | TACTGAACTGCCAAGATCC |
| 4095 | GATCTTGGCAGTTCAGTAT | 4096 | ATACTGAACTGCCAAGATC |
| 4097 | ATCTTGGCAGTTCAGTATC | 4098 | GATACTGAACTGCCAAGAT |
| 4099 | TCTTGGCAGTTCAGTATCG | 4100 | CGATACTGAACTGCCAAGA |
| 4101 | CTTGGCAGTTCAGTATCGA | 4102 | TCGATACTGAACTGCCAAG |
| 4103 | TTGGCAGTTCAGTATCGAT | 4104 | ATCGATACTGAACTGCCAA |
| 4105 | TGGCAGTTCAGTATCGATG | 4106 | CATCGATACTGAACTGCCA |
| 4107 | GGCAGTTCAGTATCGATGG | 4108 | CCATCGATACTGAACTGCC |
| 4109 | GCAGTTCAGTATCGATGGA | 4110 | TCCATCGATACTGAACTGC |
| 4111 | CAGTTCAGTATCGATGGAC | 4112 | GTCCATCGATACTGAACTG |
| 4113 | AGTTCAGTATCGATGGACA | 4114 | TGTCCATCGATACTGAACT |
| 4115 | GTTCAGTATCGATGGACAG | 4116 | CTGTCCATCGATACTGAAC |
| 4117 | TTCAGTATCGATGGACAGA | 4118 | TCTGTCCATCGATACTGAA |
| 4119 | TCAGTATCGATGGACAGAC | 4120 | GTCTGTCCATCGATACTGA |
| 4121 | CAGTATCGATGGACAGACC | 4122 | GGTCTGTCCATCGATACTG |
| 4123 | AGTATCGATGGACAGACCT | 4124 | AGGTCTGTCCATCGATACT |
| 4125 | GTATCGATGGACAGACCTT | 4126 | AAGGTCTGTCCATCGATAC |
| 4127 | TATCGATGGACAGACCTTC | 4128 | GAAGGTCTGTCCATCGATA |
| 4129 | ATCGATGGACAGACCTTCC | 4130 | GGAAGGTCTGTCCATCGAT |
| 4131 | TCGATGGACAGACCTTCCT | 4132 | AGGAAGGTCTGTCCATCGA |
| 4133 | CGATGGACAGACCTTCCTA | 4134 | TAGGAAGGTCTGTCCATCG |
| 4135 | GATGGACAGACCTTCCTAC | 4136 | GTAGGAAGGTCTGTCCATC |
| 4137 | ATGGACAGACCTTCCTACT | 4138 | AGTAGGAAGGTCTGTCCAT |
| 4139 | TGGACAGACCTTCCTACTC | 4140 | GAGTAGGAAGGTCTGTCCA |
| 4141 | GGACAGACCTTCCTACTCT | 4142 | AGAGTAGGAAGGTCTGTCC |
| 4143 | GACAGACCTTCCTACTCTT | 4144 | AAGAGTAGGAAGGTCTGTC |
| 4145 | ACAGACCTTCCTACTCTTT | 4146 | AAAGAGTAGGAAGGTCTGT |
| 4147 | CAGACCTTCCTACTCTTTG | 4148 | CAAAGAGTAGGAAGGTCTG |
| 4149 | AGACCTTCCTACTCTTTGA | 4150 | TCAAAGAGTAGGAAGGTCT |
| 4151 | GACCTTCCTACTCTTTGAC | 4152 | GTCAAAGAGTAGGAAGGTC |
| 4153 | ACCTTCCTACTCTTTGACT | 4154 | AGTCAAAGAGTAGGAAGGT |
| 4155 | CCTTCCTACTCTTTGACTC | 4156 | GAGTCAAAGAGTAGGAAGG |
| 4157 | CTTCCTACTCTTTGACTCA | 4158 | TGAGTCAAAGAGTAGGAAG |
| 4159 | TTCCTACTCTTTGACTCAG | 4160 | CTGAGTCAAAGAGTAGGAA |
| 4161 | TCCTACTCTTTGACTCAGA | 4162 | TCTGAGTCAAAGAGTAGGA |
| 4163 | CCTACTCTTTGACTCAGAG | 4164 | CTCTGAGTCAAAGAGTAGG |
| 4165 | CTACTCTTTGACTCAGAGA | 4166 | TCTCTGAGTCAAAGAGTAG |
| 4167 | TACTCTTTGACTCAGAGAA | 4168 | TTCTCTGAGTCAAAGAGTA |
| 4169 | ACTCTTTGACTCAGAGAAG | 4170 | CTTCTCTGAGTCAAAGAGT |
| 4171 | CTCTTTGACTCAGAGAAGA | 4172 | TCTTCTCTGAGTCAAAGAG |
| 4173 | TCTTTGACTCAGAGAAGAG | 4174 | CTCTTCTCTGAGTCAAAGA |
| 4175 | CTTTGACTCAGAGAAGAGA | 4176 | TCTCTTCTCTGAGTCAAAG |
| 4177 | TTTGACTCAGAGAAGAGAA | 4178 | TTCTCTTCTCTGAGTCAAA |
| 4179 | TTGACTCAGAGAAGAGAAT | 4180 | ATTCTCTTCTCTGAGTCAA |
| 4181 | TGACTCAGAGAAGAGAATG | 4182 | CATTCTCTTCTCTGAGTCA |
| 4183 | GACTCAGAGAAGAGAATGT | 4184 | ACATTCTCTTCTCTGAGTC |
| 4185 | ACTCAGAGAAGAGAATGTG | 4186 | CACATTCTCTTCTCTGAGT |
| 4187 | CTCAGAGAAGAGAATGTGG | 4188 | CCACATTCTCTTCTCTGAG |
| 4189 | TCAGAGAAGAGAATGTGGA | 4190 | TCCACATTCTCTTCTCTGA |
| 4191 | CAGAGAAGAGAATGTGGAC | 4192 | GTCCACATTCTCTTCTCTG |
| 4193 | AGAGAAGAGAATGTGGACA | 4194 | TGTCCACATTCTCTTCTCT |
| 4195 | GAGAAGAGAATGTGGACAA | 4196 | TTGTCCACATTCTCTTCTC |
| 4197 | AGAAGAGAATGTGGACAAC | 4198 | GTTGTCCACATTCTCTTCT |
| 4199 | GAAGAGAATGTGGACAACG | 4200 | CGTTGTCCACATTCTCTTC |
| 4201 | AAGAGAATGTGGACAACGG | 4202 | CCGTTGTCCACATTCTCTT |
| 4203 | AGAGAATGTGGACAACGGT | 4204 | ACCGTTGTCCACATTCTCT |
| 4205 | GAGAATGTGGACAACGGTT | 4206 | AACCGTTGTCCACATTCTC |
| 4207 | AGAATGTGGACAACGGTTC | 4208 | GAACCGTTGTCCACATTCT |
| 4209 | GAATGTGGACAACGGTTCA | 4210 | TGAACCGTTGTCCACATTC |
| 4211 | AATGTGGACAACGGTTCAT | 4212 | ATGAACCGTTGTCCACATT |
| 4213 | ATGTGGACAACGGTTCATC | 4214 | GATGAACCGTTGTCCACAT |
| 4215 | TGTGGACAACGGTTCATCC | 4216 | GGATGAACCGTTGTCCACA |
| 4217 | GTGGACAACGGTTCATCCT | 4218 | AGGATGAACCGTTGTCCAC |
| 4219 | TGGACAACGGTTCATCCTG | 4220 | CAGGATGAACCGTTGTCCA |
| 4221 | GGACAACGGTTCATCCTGG | 4222 | CCAGGATGAACCGTTGTCC |
| 4223 | GACAACGGTTCATCCTGGA | 4224 | TCCAGGATGAACCGTTGTC |
| 4225 | ACAACGGTTCATCCTGGAG | 4226 | CTCCAGGATGAACCGTTGT |
| 4227 | CAACGGTTCATCCTGGAGC | 4228 | GCTCCAGGATGAACCGTTG |
| 4229 | AACGGTTCATCCTGGAGCC | 4230 | GGCTCCAGGATGAACCGTT |
| 4231 | ACGGTTCATCCTGGAGCCA | 4232 | TGGCTCCAGGATGAACCGT |
| 4233 | CGGTTCATCCTGGAGCCAG | 4234 | CTGGCTCCAGGATGAACCG |
| 4235 | GGTTCATCCTGGAGCCAGA | 4236 | TCTGGCTCCAGGATGAACC |
| 4237 | GTTCATCCTGGAGCCAGAA | 4238 | TTCTGGCTCCAGGATGAAC |
| 4239 | TTCATCCTGGAGCCAGAAA | 4240 | TTTCTGGCTCCAGGATGAA |
| 4241 | TCATCCTGGAGCCAGAAAG | 4242 | CTTTCTGGCTCCAGGATGA |
| 4243 | CATCCTGGAGCCAGAAAGA | 4244 | TCTTTCTGGCTCCAGGATG |
| 4245 | ATCCTGGAGCCAGAAAGAT | 4246 | ATCTTTCTGGCTCCAGGAT |
| 4247 | TCCTGGAGCCAGAAAGATG | 4248 | CATCTTTCTGGCTCCAGGA |
| 4249 | CCTGGAGCCAGAAAGATGA | 4250 | TCATCTTTCTGGCTCCAGG |
| 4251 | CTGGAGCCAGAAAGATGAA | 4252 | TTCATCTTTCTGGCTCCAG |
| 4253 | TGGAGCCAGAAAGATGAAA | 4254 | TTTCATCTTTCTGGCTCCA |
| 4255 | GGAGCCAGAAAGATGAAAG | 4256 | CTTTCATCTTTCTGGCTCC |
| 4257 | GAGCCAGAAAGATGAAAGA | 4258 | TCTTTCATCTTTCTGGCTC |
| 4259 | AGCCAGAAAGATGAAAGAA | 4260 | TTCTTTCATCTTTCTGGCT |
| 4261 | GCCAGAAAGATGAAAGAAA | 4262 | TTTCTTTCATCTTTCTGGC |
| 4263 | CCAGAAAGATGAAAGAAAA | 4264 | TTTTCTTTCATCTTTCTGG |
| 4265 | CAGAAAGATGAAAGAAAAG | 4266 | CTTTTCTTTCATCTTTCTG |
| 4267 | AGAAAGATGAAAGAAAAGT | 4268 | ACTTTTCTTTCATCTTTCT |
| 4269 | GAAAGATGAAAGAAAAGTG | 4270 | CACTTTTCTTTCATCTTTC |
| 4271 | AAAGATGAAAGAAAAGTGG | 4272 | CCACTTTTCTTTCATCTTT |
| 4273 | AAGATGAAAGAAAAGTGGG | 4274 | CCCACTTTTCTTTCATCTT |
| 4275 | AGATGAAAGAAAAGTGGGA | 4276 | TCCCACTTTTCTTTCATCT |
| 4277 | GATGAAAGAAAAGTGGGAG | 4278 | CTCCCACTTTTCTTTCATC |
| 4279 | ATGAAAGAAAAGTGGGAGA | 4280 | TCTCCCACTTTTCTTTCAT |
| 4281 | TGAAAGAAAAGTGGGAGAA | 4282 | TTCTCCCACTTTTCTTTCA |
| 4283 | GAAAGAAAAGTGGGAGAAT | 4284 | ATTCTCCCACTTTTCTTTC |
| 4285 | AAAGAAAAGTGGGAGAATG | 4286 | CATTCTCCCACTTTTCTTT |
| 4287 | AAGAAAAGTGGGAGAATGA | 4288 | TCATTCTCCCACTTTTCTT |
| 4289 | AGAAAAGTGGGAGAATGAC | 4290 | GTCATTCTCCCACTTTTCT |
| 4291 | GAAAAGTGGGAGAATGACA | 4292 | TGTCATTCTCCCACTTTTC |
| 4293 | AAAAGTGGGAGAATGACAA | 4294 | TTGTCATTCTCCCACTTTT |
| 4295 | AAAGTGGGAGAATGACAAG | 4296 | CTTGTCATTCTCCCACTTT |
| 4297 | AAGTGGGAGAATGACAAGG | 4298 | CCTTGTCATTCTCCCACTT |
| 4299 | AGTGGGAGAATGACAAGGA | 4300 | TCCTTGTCATTCTCCCACT |
| 4301 | GTGGGAGAATGACAAGGAT | 4302 | ATCCTTGTCATTCTCCCAC |
| 4303 | TGGGAGAATGACAAGGATG | 4304 | CATCCTTGTCATTCTCCCA |
| 4305 | GGGAGAATGACAAGGATGT | 4306 | ACATCCTTGTCATTCTCCC |
| 4307 | GGAGAATGACAAGGATGTG | 4308 | CACATCCTTGTCATTCTCC |
| 4309 | GAGAATGACAAGGATGTGG | 4310 | CCACATCCTTGTCATTCTC |
| 4311 | AGAATGACAAGGATGTGGC | 4312 | GCCACATCCTTGTCATTCT |
| 4313 | GAATGACAAGGATGTGGCC | 4314 | GGCCACATCCTTGTCATTC |
| 4315 | AATGACAAGGATGTGGCCA | 4316 | TGGCCACATCCTTGTCATT |
| 4317 | ATGACAAGGATGTGGCCAT | 4318 | ATGGCCACATCCTTGTCAT |
| 4319 | TGACAAGGATGTGGCCATG | 4320 | CATGGCCACATCCTTGTCA |
| 4321 | GACAAGGATGTGGCCATGT | 4322 | ACATGGCCACATCCTTGTC |
| 4323 | ACAAGGATGTGGCCATGTC | 4324 | GACATGGCCACATCCTTGT |
| 4325 | CAAGGATGTGGCCATGTCC | 4326 | GGACATGGCCACATCCTTG |
| 4327 | AAGGATGTGGCCATGTCCT | 4328 | AGGACATGGCCACATCCTT |
| 4329 | AGGATGTGGCCATGTCCTT | 4330 | AAGGACATGGCCACATCCT |
| 4331 | GGATGTGGCCATGTCCTTC | 4332 | GAAGGACATGGCCACATCC |
| 4333 | GATGTGGCCATGTCCTTCC | 4334 | GGAAGGACATGGCCACATC |
| 4335 | ATGTGGCCATGTCCTTCCA | 4336 | TGGAAGGACATGGCCACAT |
| 4337 | TGTGGCCATGTCCTTCCAT | 4338 | ATGGAAGGACATGGCCACA |
| 4339 | GTGGCCATGTCCTTCCATT | 4340 | AATGGAAGGACATGGCCAC |
| 4341 | TGGCCATGTCCTTCCATTA | 4342 | TAATGGAAGGACATGGCCA |
| 4343 | GGCCATGTCCTTCCATTAC | 4344 | GTAATGGAAGGACATGGCC |
| 4345 | GCCATGTCCTTCCATTACA | 4346 | TGTAATGGAAGGACATGGC |
| 4347 | CCATGTCCTTCCATTACAT | 4348 | ATGTAATGGAAGGACATGG |
| 4349 | CATGTCCTTCCATTACATC | 4350 | GATGTAATGGAAGGACATG |
| 4351 | ATGTCCTTCCATTACATCT | 4352 | AGATGTAATGGAAGGACAT |
| 4353 | TGTCCTTCCATTACATCTC | 4354 | GAGATGTAATGGAAGGACA |
| 4355 | GTCCTTCCATTACATCTCA | 4356 | TGAGATGTAATGGAAGGAC |
| 4357 | TCCTTCCATTACATCTCAA | 4358 | TTGAGATGTAATGGAAGGA |
| 4359 | CCTTCCATTACATCTCAAT | 4360 | ATTGAGATGTAATGGAAGG |
| 4361 | CTTCCATTACATCTCAATG | 4362 | CATTGAGATGTAATGGAAG |
| 4363 | TTCCATTACATCTCAATGG | 4364 | CCATTGAGATGTAATGGAA |
| 4365 | TCCATTACATCTCAATGGG | 4366 | CCCATTGAGATGTAATGGA |
| 4367 | CCATTACATCTCAATGGGA | 4368 | TCCCATTGAGATGTAATGG |
| 4369 | CATTACATCTCAATGGGAG | 4370 | CTCCCATTGAGATGTAATG |
| 4371 | ATTACATCTCAATGGGAGA | 4372 | TCTCCCATTGAGATGTAAT |
| 4373 | TTACATCTCAATGGGAGAC | 4374 | GTCTCCCATTGAGATGTAA |
| 4375 | TACATCTCAATGGGAGACT | 4376 | AGTCTCCCATTGAGATGTA |
| 4377 | ACATCTCAATGGGAGACTG | 4378 | CAGTCTCCCATTGAGATGT |
| 4379 | CATCTCAATGGGAGACTGC | 4380 | GCAGTCTCCCATTGAGATG |
| 4381 | ATCTCAATGGGAGACTGCA | 4382 | TGCAGTCTCCCATTGAGAT |
| 4383 | TCTCAATGGGAGACTGCAT | 4384 | ATGCAGTCTCCCATTGAGA |
| 4385 | CTCAATGGGAGACTGCATA | 4386 | TATGCAGTCTCCCATTGAG |
| 4387 | TCAATGGGAGACTGCATAG | 4388 | CTATGCAGTCTCCCATTGA |
| 4389 | CAATGGGAGACTGCATAGG | 4390 | CCTATGCAGTCTCCCATTG |
| 4391 | AATGGGAGACTGCATAGGA | 4392 | TCCTATGCAGTCTCCCATT |
| 4393 | ATGGGAGACTGCATAGGAT | 4394 | ATCCTATGCAGTCTCCCAT |
| 4395 | TGGGAGACTGCATAGGATG | 4396 | CATCCTATGCAGTCTCCCA |
| 4397 | GGGAGACTGCATAGGATGG | 4398 | CCATCCTATGCAGTCTCCC |
| 4399 | GGAGACTGCATAGGATGGC | 4400 | GCCATCCTATGCAGTCTCC |
| 4401 | GAGACTGCATAGGATGGCT | 4402 | AGCCATCCTATGCAGTCTC |
| 4403 | AGACTGCATAGGATGGCTT | 4404 | AAGCCATCCTATGCAGTCT |
| 4405 | GACTGCATAGGATGGCTTG | 4406 | CAAGCCATCCTATGCAGTC |
| 4407 | ACTGCATAGGATGGCTTGA | 4408 | TCAAGCCATCCTATGCAGT |
| 4409 | CTGCATAGGATGGCTTGAG | 4410 | CTCAAGCCATCCTATGCAG |
| 4411 | TGCATAGGATGGCTTGAGG | 4412 | CCTCAAGCCATCCTATGCA |
| 4413 | GCATAGGATGGCTTGAGGA | 4414 | TCCTCAAGCCATCCTATGC |
| 4415 | CATAGGATGGCTTGAGGAC | 4416 | GTCCTCAAGCCATCCTATG |
| 4417 | ATAGGATGGCTTGAGGACT | 4418 | AGTCCTCAAGCCATCCTAT |
| 4419 | TAGGATGGCTTGAGGACTT | 4420 | AAGTCCTCAAGCCATCCTA |
| 4421 | AGGATGGCTTGAGGACTTC | 4422 | GAAGTCCTCAAGCCATCCT |
| 4423 | GGATGGCTTGAGGACTTCT | 4424 | AGAAGTCCTCAAGCCATCC |
| 4425 | GATGGCTTGAGGACTTCTT | 4426 | AAGAAGTCCTCAAGCCATC |
| 4427 | ATGGCTTGAGGACTTCTTG | 4428 | CAAGAAGTCCTCAAGCCAT |
| 4429 | TGGCTTGAGGACTTCTTGA | 4430 | TCAAGAAGTCCTCAAGCCA |
| 4431 | GGCTTGAGGACTTCTTGAT | 4432 | ATCAAGAAGTCCTCAAGCC |
| 4433 | GCTTGAGGACTTCTTGATG | 4434 | CATCAAGAAGTCCTCAAGC |
| 4435 | CTTGAGGACTTCTTGATGG | 4436 | CCATCAAGAAGTCCTCAAG |
| 4437 | TTGAGGACTTCTTGATGGG | 4438 | CCCATCAAGAAGTCCTCAA |
| 4439 | TGAGGACTTCTTGATGGGC | 4440 | GCCCATCAAGAAGTCCTCA |
| 4441 | GAGGACTTCTTGATGGGCA | 4442 | TGCCCATCAAGAAGTCCTC |
| 4443 | AGGACTTCTTGATGGGCAT | 4444 | ATGCCCATCAAGAAGTCCT |
| 4445 | GGACTTCTTGATGGGCATG | 4446 | CATGCCCATCAAGAAGTCC |
| 4447 | GACTTCTTGATGGGCATGG | 4448 | CCATGCCCATCAAGAAGTC |
| 4449 | ACTTCTTGATGGGCATGGA | 4450 | TCCATGCCCATCAAGAAGT |
| 4451 | CTTCTTGATGGGCATGGAC | 4452 | GTCCATGCCCATCAAGAAG |
| 4453 | TTCTTGATGGGCATGGACA | 4454 | TGTCCATGCCCATCAAGAA |
| 4455 | TCTTGATGGGCATGGACAG | 4456 | CTGTCCATGCCCATCAAGA |
| 4457 | CTTGATGGGCATGGACAGC | 4458 | GCTGTCCATGCCCATCAAG |
| 4459 | TTGATGGGCATGGACAGCA | 4460 | TGCTGTCCATGCCCATCAA |
| 4461 | TGATGGGCATGGACAGCAC | 4462 | GTGCTGTCCATGCCCATCA |
| 4463 | GATGGGCATGGACAGCACC | 4464 | GGTGCTGTCCATGCCCATC |
| 4465 | ATGGGCATGGACAGCACCC | 4466 | GGGTGCTGTCCATGCCCAT |
| 4467 | TGGGCATGGACAGCACCCT | 4468 | AGGGTGCTGTCCATGCCCA |
| 4469 | GGGCATGGACAGCACCCTG | 4470 | CAGGGTGCTGTCCATGCCC |
| 4471 | GGCATGGACAGCACCCTGG | 4472 | CCAGGGTGCTGTCCATGCC |
| 4473 | GCATGGACAGCACCCTGGA | 4474 | TCCAGGGTGCTGTCCATGC |
| 4475 | CATGGACAGCACCCTGGAG | 4476 | CTCCAGGGTGCTGTCCATG |
| 4477 | ATGGACAGCACCCTGGAGC | 4478 | GCTCCAGGGTGCTGTCCAT |
| 4479 | TGGACAGCACCCTGGAGCC | 4480 | GGCTCCAGGGTGCTGTCCA |
| 4481 | GGACAGCACCCTGGAGCCA | 4482 | TGGCTCCAGGGTGCTGTCC |
| 4483 | GACAGCACCCTGGAGCCAA | 4484 | TTGGCTCCAGGGTGCTGTC |
| 4485 | ACAGCACCCTGGAGCCAAG | 4486 | CTTGGCTCCAGGGTGCTGT |
| 4487 | CAGCACCCTGGAGCCAAGT | 4488 | ACTTGGCTCCAGGGTGCTG |
| 4489 | AGCACCCTGGAGCCAAGTG | 4490 | CACTTGGCTCCAGGGTGCT |
| 4491 | GCACCCTGGAGCCAAGTGC | 4492 | GCACTTGGCTCCAGGGTGC |
| 4493 | CACCCTGGAGCCAAGTGCA | 4494 | TGCACTTGGCTCCAGGGTG |
| 4495 | ACCCTGGAGCCAAGTGCAG | 4496 | CTGCACTTGGCTCCAGGGT |
| 4497 | CCCTGGAGCCAAGTGCAGG | 4498 | CCTGCACTTGGCTCCAGGG |
| 4499 | CCTGGAGCCAAGTGCAGGA | 4500 | TCCTGCACTTGGCTCCAGG |
| 4501 | CTGGAGCCAAGTGCAGGAG | 4502 | CTCCTGCACTTGGCTCCAG |
| 4503 | TGGAGCCAAGTGCAGGAGC | 4504 | GCTCCTGCACTTGGCTCCA |
| 4505 | GGAGCCAAGTGCAGGAGCA | 4506 | TGCTCCTGCACTTGGCTCC |
| 4507 | GAGCCAAGTGCAGGAGCAC | 4508 | GTGCTCCTGCACTTGGCTC |
| 4509 | AGCCAAGTGCAGGAGCACC | 4510 | GGTGCTCCTGCACTTGGCT |
| 4511 | GCCAAGTGCAGGAGCACCA | 4512 | TGGTGCTCCTGCACTTGGC |
| 4513 | CCAAGTGCAGGAGCACCAC | 4514 | GTGGTGCTCCTGCACTTGG |
| 4515 | CAAGTGCAGGAGCACCACT | 4516 | AGTGGTGCTCCTGCACTTG |
| 4517 | AAGTGCAGGAGCACCACTC | 4518 | GAGTGGTGCTCCTGCACTT |
| 4519 | AGTGCAGGAGCACCACTCG | 4520 | CGAGTGGTGCTCCTGCACT |
| 4521 | GTGCAGGAGCACCACTCGC | 4522 | GCGAGTGGTGCTCCTGCAC |
| 4523 | TGCAGGAGCACCACTCGCC | 4524 | GGCGAGTGGTGCTCCTGCA |
| 4525 | GCAGGAGCACCACTCGCCA | 4526 | TGGCGAGTGGTGCTCCTGC |
| 4527 | CAGGAGCACCACTCGCCAT | 4528 | ATGGCGAGTGGTGCTCCTG |
| 4529 | AGGAGCACCACTCGCCATG | 4530 | CATGGCGAGTGGTGCTCCT |
| 4531 | GGAGCACCACTCGCCATGT | 4532 | ACATGGCGAGTGGTGCTCC |
| 4533 | GAGCACCACTCGCCATGTC | 4534 | GACATGGCGAGTGGTGCTC |
| 4535 | AGCACCACTCGCCATGTCC | 4536 | GGACATGGCGAGTGGTGCT |
| 4537 | GCACCACTCGCCATGTCCT | 4538 | AGGACATGGCGAGTGGTGC |
| 4539 | CACCACTCGCCATGTCCTC | 4540 | GAGGACATGGCGAGTGGTG |
| 4541 | ACCACTCGCCATGTCCTCA | 4542 | TGAGGACATGGCGAGTGGT |
| 4543 | CCACTCGCCATGTCCTCAG | 4544 | CTGAGGACATGGCGAGTGG |
| 4545 | CACTCGCCATGTCCTCAGG | 4546 | CCTGAGGACATGGCGAGTG |
| 4547 | ACTCGCCATGTCCTCAGGC | 4548 | GCCTGAGGACATGGCGAGT |
| 4549 | CTCGCCATGTCCTCAGGCA | 4550 | TGCCTGAGGACATGGCGAG |
| 4551 | TCGCCATGTCCTCAGGCAC | 4552 | GTGCCTGAGGACATGGCGA |
| 4553 | CGCCATGTCCTCAGGCACA | 4554 | TGTGCCTGAGGACATGGCG |
| 4555 | GCCATGTCCTCAGGCACAA | 4556 | TTGTGCCTGAGGACATGGC |
| 4557 | CCATGTCCTCAGGCACAAC | 4558 | GTTGTGCCTGAGGACATGG |
| 4559 | CATGTCCTCAGGCACAACC | 4560 | GGTTGTGCCTGAGGACATG |
| 4561 | ATGTCCTCAGGCACAACCC | 4562 | GGGTTGTGCCTGAGGACAT |
| 4563 | TGTCCTCAGGCACAACCCA | 4564 | TGGGTTGTGCCTGAGGACA |
| 4565 | GTCCTCAGGCACAACCCAA | 4566 | TTGGGTTGTGCCTGAGGAC |
| 4567 | TCCTCAGGCACAACCCAAC | 4568 | GTTGGGTTGTGCCTGAGGA |
| 4569 | CCTCAGGCACAACCCAACT | 4570 | AGTTGGGTTGTGCCTGAGG |
| 4571 | CTCAGGCACAACCCAACTC | 4572 | GAGTTGGGTTGTGCCTGAG |
| 4573 | TCAGGCACAACCCAACTCA | 4574 | TGAGTTGGGTTGTGCCTGA |
| 4575 | CAGGCACAACCCAACTCAG | 4576 | CTGAGTTGGGTTGTGCCTG |
| 4577 | AGGCACAACCCAACTCAGG | 4578 | CCTGAGTTGGGTTGTGCCT |
| 4579 | GGCACAACCCAACTCAGGG | 4580 | CCCTGAGTTGGGTTGTGCC |
| 4581 | GCACAACCCAACTCAGGGC | 4582 | GCCCTGAGTTGGGTTGTGC |
| 4583 | CACAACCCAACTCAGGGCC | 4584 | GGCCCTGAGTTGGGTTGTG |
| 4585 | ACAACCCAACTCAGGGCCA | 4586 | TGGCCCTGAGTTGGGTTGT |
| 4587 | CAACCCAACTCAGGGCCAC | 4588 | GTGGCCCTGAGTTGGGTTG |
| 4589 | AACCCAACTCAGGGCCACA | 4590 | TGTGGCCCTGAGTTGGGTT |
| 4591 | ACCCAACTCAGGGCCACAG | 4592 | CTGTGGCCCTGAGTTGGGT |
| 4593 | CCCAACTCAGGGCCACAGC | 4594 | GCTGTGGCCCTGAGTTGGG |
| 4595 | CCAACTCAGGGCCACAGCC | 4596 | GGCTGTGGCCCTGAGTTGG |
| 4597 | CAACTCAGGGCCACAGCCA | 4598 | TGGCTGTGGCCCTGAGTTG |
| 4599 | AACTCAGGGCCACAGCCAC | 4600 | GTGGCTGTGGCCCTGAGTT |
| 4601 | ACTCAGGGCCACAGCCACC | 4602 | GGTGGCTGTGGCCCTGAGT |
| 4603 | CTCAGGGCCACAGCCACCA | 4604 | TGGTGGCTGTGGCCCTGAG |
| 4605 | TCAGGGCCACAGCCACCAC | 4606 | GTGGTGGCTGTGGCCCTGA |
| 4607 | CAGGGCCACAGCCACCACC | 4608 | GGTGGTGGCTGTGGCCCTG |
| 4609 | AGGGCCACAGCCACCACCC | 4610 | GGGTGGTGGCTGTGGCCCT |
| 4611 | GGGCCACAGCCACCACCCT | 4612 | AGGGTGGTGGCTGTGGCCC |
| 4613 | GGCCACAGCCACCACCCTC | 4614 | GAGGGTGGTGGCTGTGGCC |
| 4615 | GCCACAGCCACCACCCTCA | 4616 | TGAGGGTGGTGGCTGTGGC |
| 4617 | CCACAGCCACCACCCTCAT | 4618 | ATGAGGGTGGTGGCTGTGG |
| 4619 | CACAGCCACCACCCTCATC | 4620 | GATGAGGGTGGTGGCTGTG |
| 4621 | ACAGCCACCACCCTCATCC | 4622 | GGATGAGGGTGGTGGCTGT |
| 4623 | CAGCCACCACCCTCATCCT | 4624 | AGGATGAGGGTGGTGGCTG |
| 4625 | AGCCACCACCCTCATCCTT | 4626 | AAGGATGAGGGTGGTGGCT |
| 4627 | GCCACCACCCTCATCCTTT | 4628 | AAAGGATGAGGGTGGTGGC |
| 4629 | CCACCACCCTCATCCTTTG | 4630 | CAAAGGATGAGGGTGGTGG |
| 4631 | CACCACCCTCATCCTTTGC | 4632 | GCAAAGGATGAGGGTGGTG |
| 4633 | ACCACCCTCATCCTTTGCT | 4634 | AGCAAAGGATGAGGGTGGT |
| 4635 | CCACCCTCATCCTTTGCTG | 4636 | CAGCAAAGGATGAGGGTGG |
| 4637 | CACCCTCATCCTTTGCTGC | 4638 | GCAGCAAAGGATGAGGGTG |
| 4639 | ACCCTCATCCTTTGCTGCC | 4640 | GGCAGCAAAGGATGAGGGT |
| 4641 | CCCTCATCCTTTGCTGCCT | 4642 | AGGCAGCAAAGGATGAGGG |
| 4643 | CCTCATCCTTTGCTGCCTC | 4644 | GAGGCAGCAAAGGATGAGG |
| 4645 | CTCATCCTTTGCTGCCTCC | 4646 | GGAGGCAGCAAAGGATGAG |
| 4647 | TCATCCTTTGCTGCCTCCT | 4648 | AGGAGGCAGCAAAGGATGA |
| 4649 | CATCCTTTGCTGCCTCCTC | 4650 | GAGGAGGCAGCAAAGGATG |
| 4651 | ATCCTTTGCTGCCTCCTCA | 4652 | TGAGGAGGCAGCAAAGGAT |
| 4653 | TCCTTTGCTGCCTCCTCAT | 4654 | ATGAGGAGGCAGCAAAGGA |
| 4655 | CCTTTGCTGCCTCCTCATC | 4656 | GATGAGGAGGCAGCAAAGG |
| 4657 | CTTTGCTGCCTCCTCATCA | 4658 | TGATGAGGAGGCAGCAAAG |
| 4659 | TTTGCTGCCTCCTCATCAT | 4660 | ATGATGAGGAGGCAGCAAA |
| 4661 | TTGCTGCCTCCTCATCATC | 4662 | GATGATGAGGAGGCAGCAA |
| 4663 | TGCTGCCTCCTCATCATCC | 4664 | GGATGATGAGGAGGCAGCA |
| 4665 | GCTGCCTCCTCATCATCCT | 4666 | AGGATGATGAGGAGGCAGC |
| 4667 | CTGCCTCCTCATCATCCTC | 4668 | GAGGATGATGAGGAGGCAG |
| 4669 | TGCCTCCTCATCATCCTCC | 4670 | GGAGGATGATGAGGAGGCA |
| 4671 | GCCTCCTCATCATCCTCCC | 4672 | GGGAGGATGATGAGGAGGC |
| 4673 | CCTCCTCATCATCCTCCCC | 4674 | GGGGAGGATGATGAGGAGG |
| 4675 | CTCCTCATCATCCTCCCCT | 4676 | AGGGGAGGATGATGAGGAG |
| 4677 | TCCTCATCATCCTCCCCTG | 4678 | CAGGGGAGGATGATGAGGA |
| 4679 | CCTCATCATCCTCCCCTGC | 4680 | GCAGGGGAGGATGATGAGG |
| 4681 | CTCATCATCCTCCCCTGCT | 4682 | AGCAGGGGAGGATGATGAG |
| 4683 | TCATCATCCTCCCCTGCTT | 4684 | AAGCAGGGGAGGATGATGA |
| 4685 | CATCATCCTCCCCTGCTTC | 4686 | GAAGCAGGGGAGGATGATG |
| 4687 | ATCATCCTCCCCTGCTTCA | 4688 | TGAAGCAGGGGAGGATGAT |
| 4689 | TCATCCTCCCCTGCTTCAT | 4690 | ATGAAGCAGGGGAGGATGA |
| 4691 | CATCCTCCCCTGCTTCATC | 4692 | GATGAAGCAGGGGAGGATG |
| 4693 | ATCCTCCCCTGCTTCATCC | 4694 | GGATGAAGCAGGGGAGGAT |
| 4695 | TCCTCCCCTGCTTCATCCT | 4696 | AGGATGAAGCAGGGGAGGA |
| 4697 | CCTCCCCTGCTTCATCCTC | 4698 | GAGGATGAAGCAGGGGAGG |
| 4699 | CTCCCCTGCTTCATCCTCC | 4700 | GGAGGATGAAGCAGGGGAG |
| 4701 | TCCCCTGCTTCATCCTCCC | 4702 | GGGAGGATGAAGCAGGGGA |
| 4703 | CCCCTGCTTCATCCTCCCT | 4704 | AGGGAGGATGAAGCAGGGG |
| 4705 | CCCTGCTTCATCCTCCCTG | 4706 | CAGGGAGGATGAAGCAGGG |
| 4707 | CCTGCTTCATCCTCCCTGG | 4708 | CCAGGGAGGATGAAGCAGG |
| 4709 | CTGCTTCATCCTCCCTGGC | 4710 | GCCAGGGAGGATGAAGCAG |
| 4711 | TGCTTCATCCTCCCTGGCA | 4712 | TGCCAGGGAGGATGAAGCA |
| 4713 | GCTTCATCCTCCCTGGCAT | 4714 | ATGCCAGGGAGGATGAAGC |
| 4715 | CTTCATCCTCCCTGGCATC | 4716 | GATGCCAGGGAGGATGAAG |
| 4717 | TTCATCCTCCCTGGCATCT | 4718 | AGATGCCAGGGAGGATGAA |
| 4719 | TCATCCTCCCTGGCATCTG | 4720 | CAGATGCCAGGGAGGATGA |

TABLE 12
Human ULBP3 NM_024518

| SEQID NO. | siRNA (19bp) | SEQID NO. | Reverse complement |
|---|---|---|---|
| 4721 | ATGGCAGCGGCCGCCAGCC | 4722 | GGCTGGCGGCCGCTGCCAT |
| 4723 | TGGCAGCGGCCGCCAGCCC | 4724 | GGGCTGGCGGCCGCTGCCA |
| 4725 | GGCAGCGGCCGCCAGCCCC | 4726 | GGGGCTGGCGGCCGCTGCC |
| 4727 | GCAGCGGCCGCCAGCCCCG | 4728 | CGGGGCTGGCGGCCGCTGC |
| 4729 | CAGCGGCCGCCAGCCCCGC | 4730 | GCGGGGCTGGCGGCCGCTG |
| 4731 | AGCGGCCGCCAGCCCCGCG | 4732 | CGCGGGGCTGGCGGCCGCT |
| 4733 | GCGGCCGCCAGCCCCGCGA | 4734 | TCGCGGGGCTGGCGGCCGC |
| 4735 | CGGCCGCCAGCCCCGCGAT | 4736 | ATCGCGGGGCTGGCGGCCG |
| 4737 | GGCCGCCAGCCCCGCGATC | 4738 | GATCGCGGGGCTGGCGGCC |
| 4739 | GCCGCCAGCCCCGCGATCC | 4740 | GGATCGCGGGGCTGGCGGC |
| 4741 | CCGCCAGCCCCGCGATCCT | 4742 | AGGATCGCGGGGCTGGCGG |
| 4743 | CGCCAGCCCCGCGATCCTT | 4744 | AAGGATCGCGGGGCTGGCG |
| 4745 | GCCAGCCCCGCGATCCTTC | 4746 | GAAGGATCGCGGGGCTGGC |
| 4747 | CCAGCCCCGCGATCCTTCC | 4748 | GGAAGGATCGCGGGGCTGG |
| 4749 | CAGCCCCGCGATCCTTCCG | 4750 | CGGAAGGATCGCGGGGCTG |
| 4751 | AGCCCCGCGATCCTTCCGC | 4752 | GCGGAAGGATCGCGGGGCT |
| 4753 | GCCCCGCGATCCTTCCGCG | 4754 | CGCGGAAGGATCGCGGGGC |
| 4755 | CCCCGCGATCCTTCCGCGC | 4756 | GCGCGGAAGGATCGCGGGG |
| 4757 | CCCGCGATCCTTCCGCGCC | 4758 | GGCGCGGAAGGATCGCGGG |
| 4759 | CCGCGATCCTTCCGCGCCT | 4760 | AGGCGCGGAAGGATCGCGG |
| 4761 | CGCGATCCTTCCGCGCCTC | 4762 | GAGGCGCGGAAGGATCGCG |
| 4763 | GCGATCCTTCCGCGCCTCG | 4764 | CGAGGCGCGGAAGGATCGC |
| 4765 | CGATCCTTCCGCGCCTCGC | 4766 | GCGAGGCGCGGAAGGATCG |
| 4767 | GATCCTTCCGCGCCTCGCG | 4768 | CGCGAGGCGCGGAAGGATC |
| 4769 | ATCCTTCCGCGCCTCGCGA | 4770 | TCGCGAGGCGCGGAAGGAT |
| 4771 | TCCTTCCGCGCCTCGCGAT | 4772 | ATCGCGAGGCGCGGAAGGA |
| 4773 | CCTTCCGCGCCTCGCGATT | 4774 | AATCGCGAGGCGCGGAAGG |
| 4775 | CTTCCGCGCCTCGCGATTC | 4776 | GAATCGCGAGGCGCGGAAG |
| 4777 | TTCCGCGCCTCGCGATTCT | 4778 | AGAATCGCGAGGCGCGGAA |
| 4779 | TCCGCGCCTCGCGATTCTT | 4780 | AAGAATCGCGAGGCGCGGA |
| 4781 | CCGCGCCTCGCGATTCTTC | 4782 | GAAGAATCGCGAGGCGCGG |
| 4783 | CGCGCCTCGCGATTCTTCC | 4784 | GGAAGAATCGCGAGGCGCG |
| 4785 | GCGCCTCGCGATTCTTCCG | 4786 | CGGAAGAATCGCGAGGCGC |
| 4787 | CGCCTCGCGATTCTTCCGT | 4788 | ACGGAAGAATCGCGAGGCG |
| 4789 | GCCTCGCGATTCTTCCGTA | 4790 | TACGGAAGAATCGCGAGGC |
| 4791 | CCTCGCGATTCTTCCGTAC | 4792 | GTACGGAAGAATCGCGAGG |
| 4793 | CTCGCGATTCTTCCGTACC | 4794 | GGTACGGAAGAATCGCGAG |
| 4795 | TCGCGATTCTTCCGTACCT | 4796 | AGGTACGGAAGAATCGCGA |
| 4797 | CGCGATTCTTCCGTACCTG | 4798 | CAGGTACGGAAGAATCGCG |
| 4799 | GCGATTCTTCCGTACCTGC | 4800 | GCAGGTACGGAAGAATCGC |
| 4801 | CGATTCTTCCGTACCTGCT | 4802 | AGCAGGTACGGAAGAATCG |
| 4803 | GATTCTTCCGTACCTGCTA | 4804 | TAGCAGGTACGGAAGAATC |
| 4805 | ATTCTTCCGTACCTGCTAT | 4806 | ATAGCAGGTACGGAAGAAT |
| 4807 | TTCTTCCGTACCTGCTATT | 4808 | AATAGCAGGTACGGAAGAA |
| 4809 | TCTTCCGTACCTGCTATTC | 4810 | GAATAGCAGGTACGGAAGA |
| 4811 | CTTCCGTACCTGCTATTCG | 4812 | CGAATAGCAGGTACGGAAG |
| 4813 | TTCCGTACCTGCTATTCGA | 4814 | TCGAATAGCAGGTACGGAA |
| 4815 | TCCGTACCTGCTATTCGAC | 4816 | GTCGAATAGCAGGTACGGA |
| 4817 | CCGTACCTGCTATTCGACT | 4818 | AGTCGAATAGCAGGTACGG |
| 4819 | CGTACCTGCTATTCGACTG | 4820 | CAGTCGAATAGCAGGTACG |
| 4821 | GTACCTGCTATTCGACTGG | 4822 | CCAGTCGAATAGCAGGTAC |
| 4823 | TACCTGCTATTCGACTGGT | 4824 | ACCAGTCGAATAGCAGGTA |
| 4825 | ACCTGCTATTCGACTGGTC | 4826 | GACCAGTCGAATAGCAGGT |
| 4827 | CCTGCTATTCGACTGGTCC | 4828 | GGACCAGTCGAATAGCAGG |
| 4829 | CTGCTATTCGACTGGTCCG | 4830 | CGGACCAGTCGAATAGCAG |
| 4831 | TGCTATTCGACTGGTCCGG | 4832 | CCGGACCAGTCGAATAGCA |
| 4833 | GCTATTCGACTGGTCCGGG | 4834 | CCCGGACCAGTCGAATAGC |
| 4835 | CTATTCGACTGGTCCGGGA | 4836 | TCCCGGACCAGTCGAATAG |
| 4837 | TATTCGACTGGTCCGGGAC | 4838 | GTCCCGGACCAGTCGAATA |
| 4839 | ATTCGACTGGTCCGGGACG | 4840 | CGTCCCGGACCAGTCGAAT |
| 4841 | TTCGACTGGTCCGGGACGG | 4842 | CCGTCCCGGACCAGTCGAA |
| 4843 | TCGACTGGTCCGGGACGGG | 4844 | CCCGTCCCGGACCAGTCGA |
| 4845 | CGACTGGTCCGGGACGGGG | 4846 | CCCCGTCCCGGACCAGTCG |
| 4847 | GACTGGTCCGGGACGGGGC | 4848 | GCCCCGTCCCGGACCAGTC |
| 4849 | ACTGGTCCGGGACGGGGCG | 4850 | CGCCCCGTCCCGGACCAGT |
| 4851 | CTGGTCCGGGACGGGGCGG | 4852 | CCGCCCCGTCCCGGACCAG |
| 4853 | TGGTCCGGGACGGGGCGGG | 4854 | CCCGCCCCGTCCCGGACCA |
| 4855 | GGTCCGGGACGGGGCGGGC | 4856 | GCCCGCCCCGTCCCGGACC |
| 4857 | GTCCGGGACGGGGCGGGCC | 4858 | GGCCCGCCCCGTCCCGGAC |
| 4859 | TCCGGGACGGGGCGGGCCG | 4860 | CGGCCCGCCCCGTCCCGGA |
| 4861 | CCGGGACGGGGCGGGCCGA | 4862 | TCGGCCCGCCCCGTCCCGG |
| 4863 | CGGGACGGGGCGGGCCGAC | 4864 | GTCGGCCCGCCCCGTCCCG |
| 4865 | GGGACGGGGCGGGCCGACG | 4866 | CGTCGGCCCGCCCCGTCCC |
| 4867 | GGACGGGGCGGGCCGACGC | 4868 | GCGTCGGCCCGCCCCGTCC |
| 4869 | GACGGGGCGGGCCGACGCT | 4870 | AGCGTCGGCCCGCCCCGTC |
| 4871 | ACGGGGCGGGCCGACGCTC | 4872 | GAGCGTCGGCCCGCCCCGT |
| 4873 | CGGGGCGGGCCGACGCTCA | 4874 | TGAGCGTCGGCCCGCCCCG |
| 4875 | GGGGCGGGCCGACGCTCAC | 4876 | GTGAGCGTCGGCCCGCCCC |
| 4877 | GGGCGGGCCGACGCTCACT | 4878 | AGTGAGCGTCGGCCCGCCC |
| 4879 | GGCGGGCCGACGCTCACTC | 4880 | GAGTGAGCGTCGGCCCGCC |
| 4881 | GCGGGCCGACGCTCACTCT | 4882 | AGAGTGAGCGTCGGCCCGC |
| 4883 | CGGGCCGACGCTCACTCTC | 4884 | GAGAGTGAGCGTCGGCCCG |
| 4885 | GGGCCGACGCTCACTCTCT | 4886 | AGAGAGTGAGCGTCGGCCC |
| 4887 | GGCCGACGCTCACTCTCTC | 4888 | GAGAGAGTGAGCGTCGGCC |
| 4889 | GCCGACGCTCACTCTCTCT | 4890 | AGAGAGAGTGAGCGTCGGC |
| 4891 | CCGACGCTCACTCTCTCTG | 4892 | CAGAGAGAGTGAGCGTCGG |
| 4893 | CGACGCTCACTCTCTCTGG | 4894 | CCAGAGAGAGTGAGCGTCG |
| 4895 | GACGCTCACTCTCTCTGGT | 4896 | ACCAGAGAGAGTGAGCGTC |
| 4897 | ACGCTCACTCTCTCTGGTA | 4898 | TACCAGAGAGAGTGAGCGT |
| 4899 | CGCTCACTCTCTCTGGTAT | 4900 | ATACCAGAGAGAGTGAGCG |
| 4901 | GCTCACTCTCTCTGGTATA | 4902 | TATACCAGAGAGAGTGAGC |
| 4903 | CTCACTCTCTCTGGTATAA | 4904 | TTATACCAGAGAGAGTGAG |
| 4905 | TCACTCTCTCTGGTATAAC | 4906 | GTTATACCAGAGAGAGTGA |
| 4907 | CACTCTCTCTGGTATAACT | 4908 | AGTTATACCAGAGAGAGTG |
| 4909 | ACTCTCTCTGGTATAACTT | 4910 | AAGTTATACCAGAGAGAGT |
| 4911 | CTCTCTCTGGTATAACTTC | 4912 | GAAGTTATACCAGAGAGAG |
| 4913 | TCTCTCTGGTATAACTTCA | 4914 | TGAAGTTATACCAGAGAGA |
| 4915 | CTCTCTGGTATAACTTCAC | 4916 | GTGAAGTTATACCAGAGAG |
| 4917 | TCTCTGGTATAACTTCACC | 4918 | GGTGAAGTTATACCAGAGA |
| 4919 | CTCTGGTATAACTTCACCA | 4920 | TGGTGAAGTTATACCAGAG |
| 4921 | TCTGGTATAACTTCACCAT | 4922 | ATGGTGAAGTTATACCAGA |
| 4923 | CTGGTATAACTTCACCATC | 4924 | GATGGTGAAGTTATACCAG |
| 4925 | TGGTATAACTTCACCATCA | 4926 | TGATGGTGAAGTTATACCA |
| 4927 | GGTATAACTTCACCATCAT | 4928 | ATGATGGTGAAGTTATACC |
| 4929 | GTATAACTTCACCATCATT | 4930 | AATGATGGTGAAGTTATAC |
| 4931 | TATAACTTCACCATCATTC | 4932 | GAATGATGGTGAAGTTATA |
| 4933 | ATAACTTCACCATCATTCA | 4934 | TGAATGATGGTGAAGTTAT |
| 4935 | TAACTTCACCATCATTCAT | 4936 | ATGAATGATGGTGAAGTTA |
| 4937 | AACTTCACCATCATTCATT | 4938 | AATGAATGATGGTGAAGTT |
| 4939 | ACTTCACCATCATTCATTT | 4940 | AAATGAATGATGGTGAAGT |
| 4941 | CTTCACCATCATTCATTTG | 4942 | CAAATGAATGATGGTGAAG |
| 4943 | TTCACCATCATTCATTTGC | 4944 | GCAAATGAATGATGGTGAA |
| 4945 | TCACCATCATTCATTTGCC | 4946 | GGCAAATGAATGATGGTGA |
| 4947 | CACCATCATTCATTTGCCC | 4948 | GGGCAAATGAATGATGGTG |
| 4949 | ACCATCATTCATTTGCCCA | 4950 | TGGGCAAATGAATGATGGT |
| 4951 | CCATCATTCATTTGCCCAG | 4952 | CTGGGCAAATGAATGATGG |
| 4953 | CATCATTCATTTGCCCAGA | 4954 | TCTGGGCAAATGAATGATG |
| 4955 | ATCATTCATTTGCCCAGAC | 4956 | GTCTGGGCAAATGAATGAT |
| 4957 | TCATTCATTTGCCCAGACA | 4958 | TGTCTGGGCAAATGAATGA |
| 4959 | CATTCATTTGCCCAGACAT | 4960 | ATGTCTGGGCAAATGAATG |
| 4961 | ATTCATTTGCCCAGACATG | 4962 | CATGTCTGGGCAAATGAAT |
| 4963 | TTCATTTGCCCAGACATGG | 4964 | CCATGTCTGGGCAAATGAA |
| 4965 | TCATTTGCCCAGACATGGG | 4966 | CCCATGTCTGGGCAAATGA |
| 4967 | CATTTGCCCAGACATGGGC | 4968 | GCCCATGTCTGGGCAAATG |
| 4969 | ATTTGCCCAGACATGGGCA | 4970 | TGCCCATGTCTGGGCAAAT |
| 4971 | TTTGCCCAGACATGGGCAA | 4972 | TTGCCCATGTCTGGGCAAA |
| 4973 | TTGCCCAGACATGGGCAAC | 4974 | GTTGCCCATGTCTGGGCAA |
| 4975 | TGCCCAGACATGGGCAACA | 4976 | TGTTGCCCATGTCTGGGCA |
| 4977 | GCCCAGACATGGGCAACAG | 4978 | CTGTTGCCCATGTCTGGGC |
| 4979 | CCCAGACATGGGCAACAGT | 4980 | ACTGTTGCCCATGTCTGGG |
| 4981 | CCAGACATGGGCAACAGTG | 4982 | CACTGTTGCCCATGTCTGG |
| 4983 | CAGACATGGGCAACAGTGG | 4984 | CCACTGTTGCCCATGTCTG |
| 4985 | AGACATGGGCAACAGTGGT | 4986 | ACCACTGTTGCCCATGTCT |
| 4987 | GACATGGGCAACAGTGGTG | 4988 | CACCACTGTTGCCCATGTC |
| 4989 | ACATGGGCAACAGTGGTGT | 4990 | ACACCACTGTTGCCCATGT |
| 4991 | CATGGGCAACAGTGGTGTG | 4992 | CACACCACTGTTGCCCATG |
| 4993 | ATGGGCAACAGTGGTGTGA | 4994 | TCACACCACTGTTGCCCAT |
| 4995 | TGGGCAACAGTGGTGTGAG | 4996 | CTCACACCACTGTTGCCCA |
| 4997 | GGGCAACAGTGGTGTGAGG | 4998 | CCTCACACCACTGTTGCCC |
| 4999 | GGCAACAGTGGTGTGAGGT | 5000 | ACCTCACACCACTGTTGCC |
| 5001 | GCAACAGTGGTGTGAGGTC | 5002 | GACCTCACACCACTGTTGC |
| 5003 | CAACAGTGGTGTGAGGTCC | 5004 | GGACCTCACACCACTGTTG |
| 5005 | AACAGTGGTGTGAGGTCCA | 5006 | TGGACCTCACACCACTGTT |
| 5007 | ACAGTGGTGTGAGGTCCAG | 5008 | CTGGACCTCACACCACTGT |
| 5009 | CAGTGGTGTGAGGTCCAGA | 5010 | TCTGGACCTCACACCACTG |
| 5011 | AGTGGTGTGAGGTCCAGAG | 5012 | CTCTGGACCTCACACCACT |
| 5013 | GTGGTGTGAGGTCCAGAGC | 5014 | GCTCTGGACCTCACACCAC |
| 5015 | TGGTGTGAGGTCCAGAGCC | 5016 | GGCTCTGGACCTCACACCA |
| 5017 | GGTGTGAGGTCCAGAGCCA | 5018 | TGGCTCTGGACCTCACACC |
| 5019 | GTGTGAGGTCCAGAGCCAG | 5020 | CTGGCTCTGGACCTCACAC |
| 5021 | TGTGAGGTCCAGAGCCAGG | 5022 | CCTGGCTCTGGACCTCACA |
| 5023 | GTGAGGTCCAGAGCCAGGT | 5024 | ACCTGGCTCTGGACCTCAC |
| 5025 | TGAGGTCCAGAGCCAGGTG | 5026 | CACCTGGCTCTGGACCTCA |
| 5027 | GAGGTCCAGAGCCAGGTGG | 5028 | CCACCTGGCTCTGGACCTC |
| 5029 | AGGTCCAGAGCCAGGTGGA | 5030 | TCCACCTGGCTCTGGACCT |
| 5031 | GGTCCAGAGCCAGGTGGAT | 5032 | ATCCACCTGGCTCTGGACC |
| 5033 | GTCCAGAGCCAGGTGGATC | 5034 | GATCCACCTGGCTCTGGAC |
| 5035 | TCCAGAGCCAGGTGGATCA | 5036 | TGATCCACCTGGCTCTGGA |
| 5037 | CCAGAGCCAGGTGGATCAG | 5038 | CTGATCCACCTGGCTCTGG |
| 5039 | CAGAGCCAGGTGGATCAGA | 5040 | TCTGATCCACCTGGCTCTG |
| 5041 | AGAGCCAGGTGGATCAGAA | 5042 | TTCTGATCCACCTGGCTCT |
| 5043 | GAGCCAGGTGGATCAGAAG | 5044 | CTTCTGATCCACCTGGCTC |
| 5045 | AGCCAGGTGGATCAGAAGA | 5046 | TCTTCTGATCCACCTGGCT |
| 5047 | GCCAGGTGGATCAGAAGAA | 5048 | TTCTTCTGATCCACCTGGC |
| 5049 | CCAGGTGGATCAGAAGAAT | 5050 | ATTCTTCTGATCCACCTGG |
| 5051 | CAGGTGGATCAGAAGAATT | 5052 | AATTCTTCTGATCCACCTG |
| 5053 | AGGTGGATCAGAAGAATTT | 5054 | AAATTCTTCTGATCCACCT |
| 5055 | GGTGGATCAGAAGAATTTT | 5056 | AAAATTCTTCTGATCCACC |
| 5057 | GTGGATCAGAAGAATTTTC | 5058 | GAAAATTCTTCTGATCCAC |
| 5059 | TGGATCAGAAGAATTTTCT | 5060 | AGAAAATTCTTCTGATCCA |
| 5061 | GGATCAGAAGAATTTTCTC | 5062 | GAGAAAATTCTTCTGATCC |
| 5063 | GATCAGAAGAATTTTCTCT | 5064 | AGAGAAAATTCTTCTGATC |
| 5065 | ATCAGAAGAATTTTCTCTC | 5066 | GAGAGAAAATTCTTCTGAT |
| 5067 | TCAGAAGAATTTTCTCTCC | 5068 | GGAGAGAAAATTCTTCTGA |
| 5069 | CAGAAGAATTTTCTCTCCT | 5070 | AGGAGAGAAAATTCTTCTG |
| 5071 | AGAAGAATTTTCTCTCCTA | 5072 | TAGGAGAGAAAATTCTTCT |
| 5073 | GAAGAATTTTCTCTCCTAT | 5074 | ATAGGAGAGAAAATTCTTC |
| 5075 | AAGAATTTTCTCTCCTATG | 5076 | CATAGGAGAGAAAATTCTT |
| 5077 | AGAATTTTCTCTCCTATGA | 5078 | TCATAGGAGAGAAAATTCT |
| 5079 | GAATTTTCTCTCCTATGAC | 5080 | GTCATAGGAGAGAAAATTC |
| 5081 | AATTTTCTCTCCTATGACT | 5082 | AGTCATAGGAGAGAAAATT |
| 5083 | ATTTTCTCTCCTATGACTG | 5084 | CAGTCATAGGAGAGAAAAT |
| 5085 | TTTTCTCTCCTATGACTGT | 5086 | ACAGTCATAGGAGAGAAAA |
| 5087 | TTTCTCTCCTATGACTGTG | 5088 | CACAGTCATAGGAGAGAAA |
| 5089 | TTCTCTCCTATGACTGTGG | 5090 | CCACAGTCATAGGAGAGAA |
| 5091 | TCTCTCCTATGACTGTGGC | 5092 | GCCACAGTCATAGGAGAGA |
| 5093 | CTCTCCTATGACTGTGGCA | 5094 | TGCCACAGTCATAGGAGAG |
| 5095 | TCTCCTATGACTGTGGCAG | 5096 | CTGCCACAGTCATAGGAGA |
| 5097 | CTCCTATGACTGTGGCAGT | 5098 | ACTGCCACAGTCATAGGAG |
| 5099 | TCCTATGACTGTGGCAGTG | 5100 | CACTGCCACAGTCATAGGA |
| 5101 | CCTATGACTGTGGCAGTGA | 5102 | TCACTGCCACAGTCATAGG |
| 5103 | CTATGACTGTGGCAGTGAC | 5104 | GTCACTGCCACAGTCATAG |
| 5105 | TATGACTGTGGCAGTGACA | 5106 | TGTCACTGCCACAGTCATA |
| 5107 | ATGACTGTGGCAGTGACAA | 5108 | TTGTCACTGCCACAGTCAT |
| 5109 | TGACTGTGGCAGTGACAAG | 5110 | CTTGTCACTGCCACAGTCA |
| 5111 | GACTGTGGCAGTGACAAGG | 5112 | CCTTGTCACTGCCACAGTC |
| 5113 | ACTGTGGCAGTGACAAGGT | 5114 | ACCTTGTCACTGCCACAGT |
| 5115 | CTGTGGCAGTGACAAGGTC | 5116 | GACCTTGTCACTGCCACAG |
| 5117 | TGTGGCAGTGACAAGGTCT | 5118 | AGACCTTGTCACTGCCACA |
| 5119 | GTGGCAGTGACAAGGTCTT | 5120 | AAGACCTTGTCACTGCCAC |
| 5121 | TGGCAGTGACAAGGTCTTA | 5122 | TAAGACCTTGTCACTGCCA |
| 5123 | GGCAGTGACAAGGTCTTAT | 5124 | ATAAGACCTTGTCACTGCC |
| 5125 | GCAGTGACAAGGTCTTATC | 5126 | GATAAGACCTTGTCACTGC |
| 5127 | CAGTGACAAGGTCTTATCT | 5128 | AGATAAGACCTTGTCACTG |
| 5129 | AGTGACAAGGTCTTATCTA | 5130 | TAGATAAGACCTTGTCACT |
| 5131 | GTGACAAGGTCTTATCTAT | 5132 | ATAGATAAGACCTTGTCAC |
| 5133 | TGACAAGGTCTTATCTATG | 5134 | CATAGATAAGACCTTGTCA |
| 5135 | GACAAGGTCTTATCTATGG | 5136 | CCATAGATAAGACCTTGTC |
| 5137 | ACAAGGTCTTATCTATGGG | 5138 | CCCATAGATAAGACCTTGT |
| 5139 | CAAGGTCTTATCTATGGGT | 5140 | ACCCATAGATAAGACCTTG |
| 5141 | AAGGTCTTATCTATGGGTC | 5142 | GACCCATAGATAAGACCTT |
| 5143 | AGGTCTTATCTATGGGTCA | 5144 | TGACCCATAGATAAGACCT |
| 5145 | GGTCTTATCTATGGGTCAC | 5146 | GTGACCCATAGATAAGACC |
| 5147 | GTCTTATCTATGGGTCACC | 5148 | GGTGACCCATAGATAAGAC |
| 5149 | TCTTATCTATGGGTCACCT | 5150 | AGGTGACCCATAGATAAGA |
| 5151 | CTTATCTATGGGTCACCTA | 5152 | TAGGTGACCCATAGATAAG |
| 5153 | TTATCTATGGGTCACCTAG | 5154 | CTAGGTGACCCATAGATAA |
| 5155 | TATCTATGGGTCACCTAGA | 5156 | TCTAGGTGACCCATAGATA |
| 5157 | ATCTATGGGTCACCTAGAA | 5158 | TTCTAGGTGACCCATAGAT |
| 5159 | TCTATGGGTCACCTAGAAG | 5160 | CTTCTAGGTGACCCATAGA |
| 5161 | CTATGGGTCACCTAGAAGA | 5162 | TCTTCTAGGTGACCCATAG |
| 5163 | TATGGGTCACCTAGAAGAG | 5164 | CTCTTCTAGGTGACCCATA |
| 5165 | ATGGGTCACCTAGAAGAGC | 5166 | GCTCTTCTAGGTGACCCAT |
| 5167 | TGGGTCACCTAGAAGAGCA | 5168 | TGCTCTTCTAGGTGACCCA |
| 5169 | GGGTCACCTAGAAGAGCAG | 5170 | CTGCTCTTCTAGGTGACCC |
| 5171 | GGTCACCTAGAAGAGCAGC | 5172 | GCTGCTCTTCTAGGTGACC |
| 5173 | GTCACCTAGAAGAGCAGCT | 5174 | AGCTGCTCTTCTAGGTGAC |
| 5175 | TCACCTAGAAGAGCAGCTG | 5176 | CAGCTGCTCTTCTAGGTGA |
| 5177 | CACCTAGAAGAGCAGCTGT | 5178 | ACAGCTGCTCTTCTAGGTG |
| 5179 | ACCTAGAAGAGCAGCTGTA | 5180 | TACAGCTGCTCTTCTAGGT |
| 5181 | CCTAGAAGAGCAGCTGTAT | 5182 | ATACAGCTGCTCTTCTAGG |
| 5183 | CTAGAAGAGCAGCTGTATG | 5184 | CATACAGCTGCTCTTCTAG |
| 5185 | TAGAAGAGCAGCTGTATGC | 5186 | GCATACAGCTGCTCTTCTA |
| 5187 | AGAAGAGCAGCTGTATGCC | 5188 | GGCATACAGCTGCTCTTCT |
| 5189 | GAAGAGCAGCTGTATGCCA | 5190 | TGGCATACAGCTGCTCTTC |
| 5191 | AAGAGCAGCTGTATGCCAC | 5192 | GTGGCATACAGCTGCTCTT |
| 5193 | AGAGCAGCTGTATGCCACA | 5194 | TGTGGCATACAGCTGCTCT |
| 5195 | GAGCAGCTGTATGCCACAG | 5196 | CTGTGGCATACAGCTGCTC |
| 5197 | AGCAGCTGTATGCCACAGA | 5198 | TCTGTGGCATACAGCTGCT |
| 5199 | GCAGCTGTATGCCACAGAT | 5200 | ATCTGTGGCATACAGCTGC |
| 5201 | CAGCTGTATGCCACAGATG | 5202 | CATCTGTGGCATACAGCTG |
| 5203 | AGCTGTATGCCACAGATGC | 5204 | GCATCTGTGGCATACAGCT |
| 5205 | GCTGTATGCCACAGATGCC | 5206 | GGCATCTGTGGCATACAGC |
| 5207 | CTGTATGCCACAGATGCCT | 5208 | AGGCATCTGTGGCATACAG |
| 5209 | TGTATGCCACAGATGCCTG | 5210 | CAGGCATCTGTGGCATACA |
| 5211 | GTATGCCACAGATGCCTGG | 5212 | CCAGGCATCTGTGGCATAC |
| 5213 | TATGCCACAGATGCCTGGG | 5214 | CCCAGGCATCTGTGGCATA |
| 5215 | ATGCCACAGATGCCTGGGG | 5216 | CCCCAGGCATCTGTGGCAT |
| 5217 | TGCCACAGATGCCTGGGGA | 5218 | TCCCCAGGCATCTGTGGCA |
| 5219 | GCCACAGATGCCTGGGGAA | 5220 | TTCCCCAGGCATCTGTGGC |
| 5221 | CCACAGATGCCTGGGGAAA | 5222 | TTTCCCCAGGCATCTGTGG |
| 5223 | CACAGATGCCTGGGGAAAA | 5224 | TTTTCCCCAGGCATCTGTG |
| 5225 | ACAGATGCCTGGGGAAAAC | 5226 | GTTTTCCCCAGGCATCTGT |
| 5227 | CAGATGCCTGGGGAAAACA | 5228 | TGTTTTCCCCAGGCATCTG |
| 5229 | AGATGCCTGGGGAAAACAA | 5230 | TTGTTTTCCCCAGGCATCT |
| 5231 | GATGCCTGGGGAAAACAAC | 5232 | GTTGTTTTCCCCAGGCATC |
| 5233 | ATGCCTGGGGAAAACAACT | 5234 | AGTTGTTTTCCCCAGGCAT |
| 5235 | TGCCTGGGGAAAACAACTG | 5236 | CAGTTGTTTTCCCCAGGCA |
| 5237 | GCCTGGGGAAAACAACTGG | 5238 | CCAGTTGTTTTCCCCAGGC |
| 5239 | CCTGGGGAAAACAACTGGA | 5240 | TCCAGTTGTTTTCCCCAGG |
| 5241 | CTGGGGAAAACAACTGGAA | 5242 | TTCCAGTTGTTTTCCCCAG |
| 5243 | TGGGGAAAACAACTGGAAA | 5244 | TTTCCAGTTGTTTTCCCCA |
| 5245 | GGGGAAAACAACTGGAAAT | 5246 | ATTTCCAGTTGTTTTCCCC |
| 5247 | GGGAAAACAACTGGAAATG | 5248 | CATTTCCAGTTGTTTTCCC |
| 5249 | GGAAAACAACTGGAAATGC | 5250 | GCATTTCCAGTTGTTTTCC |
| 5251 | GAAAACAACTGGAAATGCT | 5252 | AGCATTTCCAGTTGTTTTC |
| 5253 | AAAACAACTGGAAATGCTG | 5254 | CAGCATTTCCAGTTGTTTT |
| 5255 | AAACAACTGGAAATGCTGA | 5256 | TCAGCATTTCCAGTTGTTT |
| 5257 | AACAACTGGAAATGCTGAG | 5258 | CTCAGCATTTCCAGTTGTT |
| 5259 | ACAACTGGAAATGCTGAGA | 5260 | TCTCAGCATTTCCAGTTGT |
| 5261 | CAACTGGAAATGCTGAGAG | 5262 | CTCTCAGCATTTCCAGTTG |
| 5263 | AACTGGAAATGCTGAGAGA | 5264 | TCTCTCAGCATTTCCAGTT |
| 5265 | ACTGGAAATGCTGAGAGAG | 5266 | CTCTCTCAGCATTTCCAGT |
| 5267 | CTGGAAATGCTGAGAGAGG | 5268 | CCTCTCTCAGCATTTCCAG |
| 5269 | TGGAAATGCTGAGAGAGGT | 5270 | ACCTCTCTCAGCATTTCCA |
| 5271 | GGAAATGCTGAGAGAGGTG | 5272 | CACCTCTCTCAGCATTTCC |
| 5273 | GAAATGCTGAGAGAGGTGG | 5274 | CCACCTCTCTCAGCATTTC |
| 5275 | AAATGCTGAGAGAGGTGGG | 5276 | CCCACCTCTCTCAGCATTT |
| 5277 | AATGCTGAGAGAGGTGGGG | 5278 | CCCCACCTCTCTCAGCATT |
| 5279 | ATGCTGAGAGAGGTGGGGC | 5280 | GCCCCACCTCTCTCAGCAT |
| 5281 | TGCTGAGAGAGGTGGGGCA | 5282 | TGCCCCACCTCTCTCAGCA |
| 5283 | GCTGAGAGAGGTGGGGCAG | 5284 | CTGCCCCACCTCTCTCAGC |
| 5285 | CTGAGAGAGGTGGGGCAGA | 5286 | TCTGCCCCACCTCTCTCAG |
| 5287 | TGAGAGAGGTGGGGCAGAG | 5288 | CTCTGCCCCACCTCTCTCA |
| 5289 | GAGAGAGGTGGGGCAGAGG | 5290 | CCTCTGCCCCACCTCTCTC |
| 5291 | AGAGAGGTGGGGCAGAGGC | 5292 | GCCTCTGCCCCACCTCTCT |
| 5293 | GAGAGGTGGGGCAGAGGCT | 5294 | AGCCTCTGCCCCACCTCTC |
| 5295 | AGAGGTGGGGCAGAGGCTC | 5296 | GAGCCTCTGCCCCACCTCT |
| 5297 | GAGGTGGGGCAGAGGCTCA | 5298 | TGAGCCTCTGCCCCACCTC |
| 5299 | AGGTGGGGCAGAGGCTCAG | 5300 | CTGAGCCTCTGCCCCACCT |
| 5301 | GGTGGGGCAGAGGCTCAGA | 5302 | TCTGAGCCTCTGCCCCACC |
| 5303 | GTGGGGCAGAGGCTCAGAC | 5304 | GTCTGAGCCTCTGCCCCAC |
| 5305 | TGGGGCAGAGGCTCAGACT | 5306 | AGTCTGAGCCTCTGCCCCA |
| 5307 | GGGGCAGAGGCTCAGACTG | 5308 | CAGTCTGAGCCTCTGCCCC |
| 5309 | GGGCAGAGGCTCAGACTGG | 5310 | CCAGTCTGAGCCTCTGCCC |
| 5311 | GGCAGAGGCTCAGACTGGA | 5312 | TCCAGTCTGAGCCTCTGCC |
| 5313 | GCAGAGGCTCAGACTGGAA | 5314 | TTCCAGTCTGAGCCTCTGC |
| 5315 | CAGAGGCTCAGACTGGAAC | 5316 | GTTCCAGTCTGAGCCTCTG |
| 5317 | AGAGGCTCAGACTGGAACT | 5318 | AGTTCCAGTCTGAGCCTCT |
| 5319 | GAGGCTCAGACTGGAACTG | 5320 | CAGTTCCAGTCTGAGCCTC |
| 5321 | AGGCTCAGACTGGAACTGG | 5322 | CCAGTTCCAGTCTGAGCCT |
| 5323 | GGCTCAGACTGGAACTGGC | 5324 | GCCAGTTCCAGTCTGAGCC |
| 5325 | GCTCAGACTGGAACTGGCT | 5326 | AGCCAGTTCCAGTCTGAGC |
| 5327 | CTCAGACTGGAACTGGCTG | 5328 | CAGCCAGTTCCAGTCTGAG |
| 5329 | TCAGACTGGAACTGGCTGA | 5330 | TCAGCCAGTTCCAGTCTGA |
| 5331 | CAGACTGGAACTGGCTGAC | 5332 | GTCAGCCAGTTCCAGTCTG |
| 5333 | AGACTGGAACTGGCTGACA | 5334 | TGTCAGCCAGTTCCAGTCT |
| 5335 | GACTGGAACTGGCTGACAC | 5336 | GTGTCAGCCAGTTCCAGTC |
| 5337 | ACTGGAACTGGCTGACACT | 5338 | AGTGTCAGCCAGTTCCAGT |
| 5339 | CTGGAACTGGCTGACACTG | 5340 | CAGTGTCAGCCAGTTCCAG |
| 5341 | TGGAACTGGCTGACACTGA | 5342 | TCAGTGTCAGCCAGTTCCA |
| 5343 | GGAACTGGCTGACACTGAG | 5344 | CTCAGTGTCAGCCAGTTCC |
| 5345 | GAACTGGCTGACACTGAGC | 5346 | GCTCAGTGTCAGCCAGTTC |
| 5347 | AACTGGCTGACACTGAGCT | 5348 | AGCTCAGTGTCAGCCAGTT |
| 5349 | ACTGGCTGACACTGAGCTG | 5350 | CAGCTCAGTGTCAGCCAGT |
| 5351 | CTGGCTGACACTGAGCTGG | 5352 | CCAGCTCAGTGTCAGCCAG |
| 5353 | TGGCTGACACTGAGCTGGA | 5354 | TCCAGCTCAGTGTCAGCCA |
| 5355 | GGCTGACACTGAGCTGGAG | 5356 | CTCCAGCTCAGTGTCAGCC |
| 5357 | GCTGACACTGAGCTGGAGG | 5358 | CCTCCAGCTCAGTGTCAGC |
| 5359 | CTGACACTGAGCTGGAGGA | 5360 | TCCTCCAGCTCAGTGTCAG |
| 5361 | TGACACTGAGCTGGAGGAT | 5362 | ATCCTCCAGCTCAGTGTCA |
| 5363 | GACACTGAGCTGGAGGATT | 5364 | AATCCTCCAGCTCAGTGTC |
| 5365 | ACACTGAGCTGGAGGATTT | 5366 | AAATCCTCCAGCTCAGTGT |
| 5367 | CACTGAGCTGGAGGATTTC | 5368 | GAAATCCTCCAGCTCAGTG |
| 5369 | ACTGAGCTGGAGGATTTCA | 5370 | TGAAATCCTCCAGCTCAGT |
| 5371 | CTGAGCTGGAGGATTTCAC | 5372 | GTGAAATCCTCCAGCTCAG |
| 5373 | TGAGCTGGAGGATTTCACA | 5374 | TGTGAAATCCTCCAGCTCA |
| 5375 | GAGCTGGAGGATTTCACAC | 5376 | GTGTGAAATCCTCCAGCTC |
| 5377 | AGCTGGAGGATTTCACACC | 5378 | GGTGTGAAATCCTCCAGCT |
| 5379 | GCTGGAGGATTTCACACCC | 5380 | GGGTGTGAAATCCTCCAGC |
| 5381 | CTGGAGGATTTCACACCCA | 5382 | TGGGTGTGAAATCCTCCAG |
| 5383 | TGGAGGATTTCACACCCAG | 5384 | CTGGGTGTGAAATCCTCCA |
| 5385 | GGAGGATTTCACACCCAGT | 5386 | ACTGGGTGTGAAATCCTCC |
| 5387 | GAGGATTTCACACCCAGTG | 5388 | CACTGGGTGTGAAATCCTC |
| 5389 | AGGATTTCACACCCAGTGG | 5390 | CCACTGGGTGTGAAATCCT |
| 5391 | GGATTTCACACCCAGTGGA | 5392 | TCCACTGGGTGTGAAATCC |
| 5393 | GATTTCACACCCAGTGGAC | 5394 | GTCCACTGGGTGTGAAATC |
| 5395 | ATTTCACACCCAGTGGACC | 5396 | GGTCCACTGGGTGTGAAAT |
| 5397 | TTTCACACCCAGTGGACCC | 5398 | GGGTCCACTGGGTGTGAAA |
| 5399 | TTCACACCCAGTGGACCCC | 5400 | GGGGTCCACTGGGTGTGAA |
| 5401 | TCACACCCAGTGGACCCCT | 5402 | AGGGGTCCACTGGGTGTGA |
| 5403 | CACACCCAGTGGACCCCTC | 5404 | GAGGGGTCCACTGGGTGTG |
| 5405 | ACACCCAGTGGACCCCTCA | 5406 | TGAGGGGTCCACTGGGTGT |
| 5407 | CACCCAGTGGACCCCTCAC | 5408 | GTGAGGGGTCCACTGGGTG |
| 5409 | ACCCAGTGGACCCCTCACG | 5410 | CGTGAGGGGTCCACTGGGT |
| 5411 | CCCAGTGGACCCCTCACGC | 5412 | GCGTGAGGGGTCCACTGGG |
| 5413 | CCAGTGGACCCCTCACGCT | 5414 | AGCGTGAGGGGTCCACTGG |
| 5415 | CAGTGGACCCCTCACGCTG | 5416 | CAGCGTGAGGGGTCCACTG |
| 5417 | AGTGGACCCCTCACGCTGC | 5418 | GCAGCGTGAGGGGTCCACT |
| 5419 | GTGGACCCCTCACGCTGCA | 5420 | TGCAGCGTGAGGGGTCCAC |
| 5421 | TGGACCCCTCACGCTGCAG | 5422 | CTGCAGCGTGAGGGGTCCA |
| 5423 | GGACCCCTCACGCTGCAGG | 5424 | CCTGCAGCGTGAGGGGTCC |
| 5425 | GACCCCTCACGCTGCAGGT | 5426 | ACCTGCAGCGTGAGGGGTC |
| 5427 | ACCCCTCACGCTGCAGGTC | 5428 | GACCTGCAGCGTGAGGGGT |
| 5429 | CCCCTCACGCTGCAGGTCA | 5430 | TGACCTGCAGCGTGAGGGG |
| 5431 | CCCTCACGCTGCAGGTCAG | 5432 | CTGACCTGCAGCGTGAGGG |
| 5433 | CCTCACGCTGCAGGTCAGG | 5434 | CCTGACCTGCAGCGTGAGG |
| 5435 | CTCACGCTGCAGGTCAGGA | 5436 | TCCTGACCTGCAGCGTGAG |
| 5437 | TCACGCTGCAGGTCAGGAT | 5438 | ATCCTGACCTGCAGCGTGA |
| 5439 | CACGCTGCAGGTCAGGATG | 5440 | CATCCTGACCTGCAGCGTG |
| 5441 | ACGCTGCAGGTCAGGATGT | 5442 | ACATCCTGACCTGCAGCGT |
| 5443 | CGCTGCAGGTCAGGATGTC | 5444 | GACATCCTGACCTGCAGCG |
| 5445 | GCTGCAGGTCAGGATGTCT | 5446 | AGACATCCTGACCTGCAGC |
| 5447 | CTGCAGGTCAGGATGTCTT | 5448 | AAGACATCCTGACCTGCAG |
| 5449 | TGCAGGTCAGGATGTCTTG | 5450 | CAAGACATCCTGACCTGCA |
| 5451 | GCAGGTCAGGATGTCTTGT | 5452 | ACAAGACATCCTGACCTGC |
| 5453 | CAGGTCAGGATGTCTTGTG | 5454 | CACAAGACATCCTGACCTG |
| 5455 | AGGTCAGGATGTCTTGTGA | 5456 | TCACAAGACATCCTGACCT |
| 5457 | GGTCAGGATGTCTTGTGAG | 5458 | CTCACAAGACATCCTGACC |
| 5459 | GTCAGGATGTCTTGTGAGT | 5460 | ACTCACAAGACATCCTGAC |
| 5461 | TCAGGATGTCTTGTGAGTG | 5462 | CACTCACAAGACATCCTGA |
| 5463 | CAGGATGTCTTGTGAGTGT | 5464 | ACACTCACAAGACATCCTG |
| 5465 | AGGATGTCTTGTGAGTGTG | 5466 | CACACTCACAAGACATCCT |
| 5467 | GGATGTCTTGTGAGTGTGA | 5468 | TCACACTCACAAGACATCC |
| 5469 | GATGTCTTGTGAGTGTGAA | 5470 | TTCACACTCACAAGACATC |
| 5471 | ATGTCTTGTGAGTGTGAAG | 5472 | CTTCACACTCACAAGACAT |
| 5473 | TGTCTTGTGAGTGTGAAGC | 5474 | GCTTCACACTCACAAGACA |
| 5475 | GTCTTGTGAGTGTGAAGCC | 5476 | GGCTTCACACTCACAAGAC |
| 5477 | TCTTGTGAGTGTGAAGCCG | 5478 | CGGCTTCACACTCACAAGA |
| 5479 | CTTGTGAGTGTGAAGCCGA | 5480 | TCGGCTTCACACTCACAAG |
| 5481 | TTGTGAGTGTGAAGCCGAT | 5482 | ATCGGCTTCACACTCACAA |
| 5483 | TGTGAGTGTGAAGCCGATG | 5484 | CATCGGCTTCACACTCACA |
| 5485 | GTGAGTGTGAAGCCGATGG | 5486 | CCATCGGCTTCACACTCAC |
| 5487 | TGAGTGTGAAGCCGATGGA | 5488 | TCCATCGGCTTCACACTCA |
| 5489 | GAGTGTGAAGCCGATGGAT | 5490 | ATCCATCGGCTTCACACTC |
| 5491 | AGTGTGAAGCCGATGGATA | 5492 | TATCCATCGGCTTCACACT |
| 5493 | GTGTGAAGCCGATGGATAC | 5494 | GTATCCATCGGCTTCACAC |
| 5495 | TGTGAAGCCGATGGATACA | 5496 | TGTATCCATCGGCTTCACA |
| 5497 | GTGAAGCCGATGGATACAT | 5498 | ATGTATCCATCGGCTTCAC |
| 5499 | TGAAGCCGATGGATACATC | 5500 | GATGTATCCATCGGCTTCA |
| 5501 | GAAGCCGATGGATACATCC | 5502 | GGATGTATCCATCGGCTTC |
| 5503 | AAGCCGATGGATACATCCG | 5504 | CGGATGTATCCATCGGCTT |
| 5505 | AGCCGATGGATACATCCGT | 5506 | ACGGATGTATCCATCGGCT |
| 5507 | GCCGATGGATACATCCGTG | 5508 | CACGGATGTATCCATCGGC |
| 5509 | CCGATGGATACATCCGTGG | 5510 | CCACGGATGTATCCATCGG |
| 5511 | CGATGGATACATCCGTGGA | 5512 | TCCACGGATGTATCCATCG |
| 5513 | GATGGATACATCCGTGGAT | 5514 | ATCCACGGATGTATCCATC |
| 5515 | ATGGATACATCCGTGGATC | 5516 | GATCCACGGATGTATCCAT |
| 5517 | TGGATACATCCGTGGATCT | 5518 | AGATCCACGGATGTATCCA |
| 5519 | GGATACATCCGTGGATCTT | 5520 | AAGATCCACGGATGTATCC |
| 5521 | GATACATCCGTGGATCTTG | 5522 | CAAGATCCACGGATGTATC |
| 5523 | ATACATCCGTGGATCTTGG | 5524 | CCAAGATCCACGGATGTAT |
| 5525 | TACATCCGTGGATCTTGGC | 5526 | GCCAAGATCCACGGATGTA |
| 5527 | ACATCCGTGGATCTTGGCA | 5528 | TGCCAAGATCCACGGATGT |
| 5529 | CATCCGTGGATCTTGGCAG | 5530 | CTGCCAAGATCCACGGATG |
| 5531 | ATCCGTGGATCTTGGCAGT | 5532 | ACTGCCAAGATCCACGGAT |
| 5533 | TCCGTGGATCTTGGCAGTT | 5534 | AACTGCCAAGATCCACGGA |
| 5535 | CCGTGGATCTTGGCAGTTC | 5536 | GAACTGCCAAGATCCACGG |
| 5537 | CGTGGATCTTGGCAGTTCA | 5538 | TGAACTGCCAAGATCCACG |
| 5539 | GTGGATCTTGGCAGTTCAG | 5540 | CTGAACTGCCAAGATCCAC |
| 5541 | TGGATCTTGGCAGTTCAGC | 5542 | GCTGAACTGCCAAGATCCA |
| 5543 | GGATCTTGGCAGTTCAGCT | 5544 | AGCTGAACTGCCAAGATCC |
| 5545 | GATCTTGGCAGTTCAGCTT | 5546 | AAGCTGAACTGCCAAGATC |
| 5547 | ATCTTGGCAGTTCAGCTTC | 5548 | GAAGCTGAACTGCCAAGAT |
| 5549 | TCTTGGCAGTTCAGCTTCG | 5550 | CGAAGCTGAACTGCCAAGA |
| 5551 | CTTGGCAGTTCAGCTTCGA | 5552 | TCGAAGCTGAACTGCCAAG |
| 5553 | TTGGCAGTTCAGCTTCGAT | 5554 | ATCGAAGCTGAACTGCCAA |
| 5555 | TGGCAGTTCAGCTTCGATG | 5556 | CATCGAAGCTGAACTGCCA |
| 5557 | GGCAGTTCAGCTTCGATGG | 5558 | CCATCGAAGCTGAACTGCC |
| 5559 | GCAGTTCAGCTTCGATGGA | 5560 | TCCATCGAAGCTGAACTGC |
| 5561 | CAGTTCAGCTTCGATGGAC | 5562 | GTCCATCGAAGCTGAACTG |
| 5563 | AGTTCAGCTTCGATGGACG | 5564 | CGTCCATCGAAGCTGAACT |
| 5565 | GTTCAGCTTCGATGGACGG | 5566 | CCGTCCATCGAAGCTGAAC |
| 5567 | TTCAGCTTCGATGGACGGA | 5568 | TCCGTCCATCGAAGCTGAA |
| 5569 | TCAGCTTCGATGGACGGAA | 5570 | TTCCGTCCATCGAAGCTGA |
| 5571 | CAGCTTCGATGGACGGAAG | 5572 | CTTCCGTCCATCGAAGCTG |
| 5573 | AGCTTCGATGGACGGAAGT | 5574 | ACTTCCGTCCATCGAAGCT |
| 5575 | GCTTCGATGGACGGAAGTT | 5576 | AACTTCCGTCCATCGAAGC |
| 5577 | CTTCGATGGACGGAAGTTC | 5578 | GAACTTCCGTCCATCGAAG |
| 5579 | TTCGATGGACGGAAGTTCC | 5580 | GGAACTTCCGTCCATCGAA |
| 5581 | TCGATGGACGGAAGTTCCT | 5582 | AGGAACTTCCGTCCATCGA |
| 5583 | CGATGGACGGAAGTTCCTC | 5584 | GAGGAACTTCCGTCCATCG |
| 5585 | GATGGACGGAAGTTCCTCC | 5586 | GGAGGAACTTCCGTCCATC |
| 5587 | ATGGACGGAAGTTCCTCCT | 5588 | AGGAGGAACTTCCGTCCAT |
| 5589 | TGGACGGAAGTTCCTCCTC | 5590 | GAGGAGGAACTTCCGTCCA |
| 5591 | GGACGGAAGTTCCTCCTCT | 5592 | AGAGGAGGAACTTCCGTCC |
| 5593 | GACGGAAGTTCCTCCTCTT | 5594 | AAGAGGAGGAACTTCCGTC |
| 5595 | ACGGAAGTTCCTCCTCTTT | 5596 | AAAGAGGAGGAACTTCCGT |
| 5597 | CGGAAGTTCCTCCTCTTTG | 5598 | CAAAGAGGAGGAACTTCCG |
| 5599 | GGAAGTTCCTCCTCTTTGA | 5600 | TCAAAGAGGAGGAACTTCC |
| 5601 | GAAGTTCCTCCTCTTTGAC | 5602 | GTCAAAGAGGAGGAACTTC |
| 5603 | AAGTTCCTCCTCTTTGACT | 5604 | AGTCAAAGAGGAGGAACTT |
| 5605 | AGTTCCTCCTCTTTGACTC | 5606 | GAGTCAAAGAGGAGGAACT |
| 5607 | GTTCCTCCTCTTTGACTCA | 5608 | TGAGTCAAAGAGGAGGAAC |
| 5609 | TTCCTCCTCTTTGACTCAA | 5610 | TTGAGTCAAAGAGGAGGAA |
| 5611 | TCCTCCTCTTTGACTCAAA | 5612 | TTTGAGTCAAAGAGGAGGA |
| 5613 | CCTCCTCTTTGACTCAAAC | 5614 | GTTTGAGTCAAAGAGGAGG |
| 5615 | CTCCTCTTTGACTCAAACA | 5616 | TGTTTGAGTCAAAGAGGAG |
| 5617 | TCCTCTTTGACTCAAACAA | 5618 | TTGTTTGAGTCAAAGAGGA |
| 5619 | CCTCTTTGACTCAAACAAC | 5620 | GTTGTTTGAGTCAAAGAGG |
| 5621 | CTCTTTGACTCAAACAACA | 5622 | TGTTGTTTGAGTCAAAGAG |
| 5623 | TCTTTGACTCAAACAACAG | 5624 | CTGTTGTTTGAGTCAAAGA |
| 5625 | CTTTGACTCAAACAACAGA | 5626 | TCTGTTGTTTGAGTCAAAG |
| 5627 | TTTGACTCAAACAACAGAA | 5628 | TTCTGTTGTTTGAGTCAAA |
| 5629 | TTGACTCAAACAACAGAAA | 5630 | TTTCTGTTGTTTGAGTCAA |
| 5631 | TGACTCAAACAACAGAAAG | 5632 | CTTTCTGTTGTTTGAGTCA |
| 5633 | GACTCAAACAACAGAAAGT | 5634 | ACTTTCTGTTGTTTGAGTC |
| 5635 | ACTCAAACAACAGAAAGTG | 5636 | CACTTTCTGTTGTTTGAGT |
| 5637 | CTCAAACAACAGAAAGTGG | 5638 | CCACTTTCTGTTGTTTGAG |
| 5639 | TCAAACAACAGAAAGTGGA | 5640 | TCCACTTTCTGTTGTTTGA |
| 5641 | CAAACAACAGAAAGTGGAC | 5642 | GTCCACTTTCTGTTGTTTG |
| 5643 | AAACAACAGAAAGTGGACA | 5644 | TGTCCACTTTCTGTTGTTT |
| 5645 | AACAACAGAAAGTGGACAG | 5646 | CTGTCCACTTTCTGTTGTT |
| 5647 | ACAACAGAAAGTGGACAGT | 5648 | ACTGTCCACTTTCTGTTGT |
| 5649 | CAACAGAAAGTGGACAGTG | 5650 | CACTGTCCACTTTCTGTTG |
| 5651 | AACAGAAAGTGGACAGTGG | 5652 | CCACTGTCCACTTTCTGTT |
| 5653 | ACAGAAAGTGGACAGTGGT | 5654 | ACCACTGTCCACTTTCTGT |
| 5655 | CAGAAAGTGGACAGTGGTT | 5656 | AACCACTGTCCACTTTCTG |
| 5657 | AGAAAGTGGACAGTGGTTC | 5658 | GAACCACTGTCCACTTTCT |
| 5659 | GAAAGTGGACAGTGGTTCA | 5660 | TGAACCACTGTCCACTTTC |
| 5661 | AAAGTGGACAGTGGTTCAC | 5662 | GTGAACCACTGTCCACTTT |
| 5663 | AAGTGGACAGTGGTTCACG | 5664 | CGTGAACCACTGTCCACTT |
| 5665 | AGTGGACAGTGGTTCACGC | 5666 | GCGTGAACCACTGTCCACT |
| 5667 | GTGGACAGTGGTTCACGCT | 5668 | AGCGTGAACCACTGTCCAC |
| 5669 | TGGACAGTGGTTCACGCTG | 5670 | CAGCGTGAACCACTGTCCA |
| 5671 | GGACAGTGGTTCACGCTGG | 5672 | CCAGCGTGAACCACTGTCC |
| 5673 | GACAGTGGTTCACGCTGGA | 5674 | TCCAGCGTGAACCACTGTC |
| 5675 | ACAGTGGTTCACGCTGGAG | 5676 | CTCCAGCGTGAACCACTGT |
| 5677 | CAGTGGTTCACGCTGGAGC | 5678 | GCTCCAGCGTGAACCACTG |
| 5679 | AGTGGTTCACGCTGGAGCC | 5680 | GGCTCCAGCGTGAACCACT |
| 5681 | GTGGTTCACGCTGGAGCCA | 5682 | TGGCTCCAGCGTGAACCAC |
| 5683 | TGGTTCACGCTGGAGCCAG | 5684 | CTGGCTCCAGCGTGAACCA |
| 5685 | GGTTCACGCTGGAGCCAGG | 5686 | CCTGGCTCCAGCGTGAACC |
| 5687 | GTTCACGCTGGAGCCAGGC | 5688 | GCCTGGCTCCAGCGTGAAC |
| 5689 | TTCACGCTGGAGCCAGGCG | 5690 | CGCCTGGCTCCAGCGTGAA |
| 5691 | TCACGCTGGAGCCAGGCGG | 5692 | CCGCCTGGCTCCAGCGTGA |
| 5693 | CACGCTGGAGCCAGGCGGA | 5694 | TCCGCCTGGCTCCAGCGTG |
| 5695 | ACGCTGGAGCCAGGCGGAT | 5696 | ATCCGCCTGGCTCCAGCGT |
| 5697 | CGCTGGAGCCAGGCGGATG | 5698 | CATCCGCCTGGCTCCAGCG |
| 5699 | GCTGGAGCCAGGCGGATGA | 5700 | TCATCCGCCTGGCTCCAGC |
| 5701 | CTGGAGCCAGGCGGATGAA | 5702 | TTCATCCGCCTGGCTCCAG |
| 5703 | TGGAGCCAGGCGGATGAAA | 5704 | TTTCATCCGCCTGGCTCCA |
| 5705 | GGAGCCAGGCGGATGAAAG | 5706 | CTTTCATCCGCCTGGCTCC |
| 5707 | GAGCCAGGCGGATGAAAGA | 5708 | TCTTTCATCCGCCTGGCTC |
| 5709 | AGCCAGGCGGATGAAAGAG | 5710 | CTCTTTCATCCGCCTGGCT |
| 5711 | GCCAGGCGGATGAAAGAGA | 5712 | TCTCTTTCATCCGCCTGGC |
| 5713 | CCAGGCGGATGAAAGAGAA | 5714 | TTCTCTTTCATCCGCCTGG |
| 5715 | CAGGCGGATGAAAGAGAAG | 5716 | CTTCTCTTTCATCCGCCTG |
| 5717 | AGGCGGATGAAAGAGAAGT | 5718 | ACTTCTCTTTCATCCGCCT |
| 5719 | GGCGGATGAAAGAGAAGTG | 5720 | CACTTCTCTTTCATCCGCC |
| 5721 | GCGGATGAAAGAGAAGTGG | 5722 | CCACTTCTCTTTCATCCGC |
| 5723 | CGGATGAAAGAGAAGTGGG | 5724 | CCCACTTCTCTTTCATCCG |
| 5725 | GGATGAAAGAGAAGTGGGA | 5726 | TCCCACTTCTCTTTCATCC |
| 5727 | GATGAAAGAGAAGTGGGAG | 5728 | CTCCCACTTCTCTTTCATC |
| 5729 | ATGAAAGAGAAGTGGGAGA | 5730 | TCTCCCACTTCTCTTTCAT |
| 5731 | TGAAAGAGAAGTGGGAGAA | 5732 | TTCTCCCACTTCTCTTTCA |
| 5733 | GAAAGAGAAGTGGGAGAAG | 5734 | CTTCTCCCACTTCTCTTTC |
| 5735 | AAAGAGAAGTGGGAGAAGG | 5736 | CCTTCTCCCACTTCTCTTT |
| 5737 | AAGAGAAGTGGGAGAAGGA | 5738 | TCCTTCTCCCACTTCTCTT |
| 5739 | AGAGAAGTGGGAGAAGGAT | 5740 | ATCCTTCTCCCACTTCTCT |
| 5741 | GAGAAGTGGGAGAAGGATA | 5742 | TATCCTTCTCCCACTTCTC |
| 5743 | AGAAGTGGGAGAAGGATAG | 5744 | CTATCCTTCTCCCACTTCT |
| 5745 | GAAGTGGGAGAAGGATAGC | 5746 | GCTATCCTTCTCCCACTTC |
| 5747 | AAGTGGGAGAAGGATAGCG | 5748 | CGCTATCCTTCTCCCACTT |
| 5749 | AGTGGGAGAAGGATAGCGG | 5750 | CCGCTATCCTTCTCCCACT |
| 5751 | GTGGGAGAAGGATAGCGGA | 5752 | TCCGCTATCCTTCTCCCAC |
| 5753 | TGGGAGAAGGATAGCGGAC | 5754 | GTCCGCTATCCTTCTCCCA |
| 5755 | GGGAGAAGGATAGCGGACT | 5756 | AGTCCGCTATCCTTCTCCC |
| 5757 | GGAGAAGGATAGCGGACTG | 5758 | CAGTCCGCTATCCTTCTCC |
| 5759 | GAGAAGGATAGCGGACTGA | 5760 | TCAGTCCGCTATCCTTCTC |
| 5761 | AGAAGGATAGCGGACTGAC | 5762 | GTCAGTCCGCTATCCTTCT |
| 5763 | GAAGGATAGCGGACTGACC | 5764 | GGTCAGTCCGCTATCCTTC |
| 5765 | AAGGATAGCGGACTGACCA | 5766 | TGGTCAGTCCGCTATCCTT |
| 5767 | AGGATAGCGGACTGACCAC | 5768 | GTGGTCAGTCCGCTATCCT |
| 5769 | GGATAGCGGACTGACCACC | 5770 | GGTGGTCAGTCCGCTATCC |
| 5771 | GATAGCGGACTGACCACCT | 5772 | AGGTGGTCAGTCCGCTATC |
| 5773 | ATAGCGGACTGACCACCTT | 5774 | AAGGTGGTCAGTCCGCTAT |
| 5775 | TAGCGGACTGACCACCTTC | 5776 | GAAGGTGGTCAGTCCGCTA |
| 5777 | AGCGGACTGACCACCTTCT | 5778 | AGAAGGTGGTCAGTCCGCT |
| 5779 | GCGGACTGACCACCTTCTT | 5780 | AAGAAGGTGGTCAGTCCGC |
| 5781 | CGGACTGACCACCTTCTTC | 5782 | GAAGAAGGTGGTCAGTCCG |
| 5783 | GGACTGACCACCTTCTTCA | 5784 | TGAAGAAGGTGGTCAGTCC |
| 5785 | GACTGACCACCTTCTTCAA | 5786 | TTGAAGAAGGTGGTCAGTC |
| 5787 | ACTGACCACCTTCTTCAAG | 5788 | CTTGAAGAAGGTGGTCAGT |
| 5789 | CTGACCACCTTCTTCAAGA | 5790 | TCTTGAAGAAGGTGGTCAG |
| 5791 | TGACCACCTTCTTCAAGAT | 5792 | ATCTTGAAGAAGGTGGTCA |
| 5793 | GACCACCTTCTTCAAGATG | 5794 | CATCTTGAAGAAGGTGGTC |
| 5795 | ACCACCTTCTTCAAGATGG | 5796 | CCATCTTGAAGAAGGTGGT |
| 5797 | CCACCTTCTTCAAGATGGT | 5798 | ACCATCTTGAAGAAGGTGG |
| 5799 | CACCTTCTTCAAGATGGTC | 5800 | GACCATCTTGAAGAAGGTG |
| 5801 | ACCTTCTTCAAGATGGTCT | 5802 | AGACCATCTTGAAGAAGGT |
| 5803 | CCTTCTTCAAGATGGTCTC | 5804 | GAGACCATCTTGAAGAAGG |
| 5805 | CTTCTTCAAGATGGTCTCA | 5806 | TGAGACCATCTTGAAGAAG |
| 5807 | TTCTTCAAGATGGTCTCAA | 5808 | TTGAGACCATCTTGAAGAA |
| 5809 | TCTTCAAGATGGTCTCAAT | 5810 | ATTGAGACCATCTTGAAGA |
| 5811 | CTTCAAGATGGTCTCAATG | 5812 | CATTGAGACCATCTTGAAG |
| 5813 | TTCAAGATGGTCTCAATGA | 5814 | TCATTGAGACCATCTTGAA |
| 5815 | TCAAGATGGTCTCAATGAG | 5816 | CTCATTGAGACCATCTTGA |
| 5817 | CAAGATGGTCTCAATGAGA | 5818 | TCTCATTGAGACCATCTTG |
| 5819 | AAGATGGTCTCAATGAGAG | 5820 | CTCTCATTGAGACCATCTT |
| 5821 | AGATGGTCTCAATGAGAGA | 5822 | TCTCTCATTGAGACCATCT |
| 5823 | GATGGTCTCAATGAGAGAC | 5824 | GTCTCTCATTGAGACCATC |
| 5825 | ATGGTCTCAATGAGAGACT | 5826 | AGTCTCTCATTGAGACCAT |
| 5827 | TGGTCTCAATGAGAGACTG | 5828 | CAGTCTCTCATTGAGACCA |
| 5829 | GGTCTCAATGAGAGACTGC | 5830 | GCAGTCTCTCATTGAGACC |
| 5831 | GTCTCAATGAGAGACTGCA | 5832 | TGCAGTCTCTCATTGAGAC |
| 5833 | TCTCAATGAGAGACTGCAA | 5834 | TTGCAGTCTCTCATTGAGA |
| 5835 | CTCAATGAGAGACTGCAAG | 5836 | CTTGCAGTCTCTCATTGAG |
| 5837 | TCAATGAGAGACTGCAAGA | 5838 | TCTTGCAGTCTCTCATTGA |
| 5839 | CAATGAGAGACTGCAAGAG | 5840 | CTCTTGCAGTCTCTCATTG |
| 5841 | AATGAGAGACTGCAAGAGC | 5842 | GCTCTTGCAGTCTCTCATT |
| 5843 | ATGAGAGACTGCAAGAGCT | 5844 | AGCTCTTGCAGTCTCTCAT |
| 5845 | TGAGAGACTGCAAGAGCTG | 5846 | CAGCTCTTGCAGTCTCTCA |
| 5847 | GAGAGACTGCAAGAGCTGG | 5848 | CCAGCTCTTGCAGTCTCTC |
| 5849 | AGAGACTGCAAGAGCTGGC | 5850 | GCCAGCTCTTGCAGTCTCT |
| 5851 | GAGACTGCAAGAGCTGGCT | 5852 | AGCCAGCTCTTGCAGTCTC |
| 5853 | AGACTGCAAGAGCTGGCTT | 5854 | AAGCCAGCTCTTGCAGTCT |
| 5855 | GACTGCAAGAGCTGGCTTA | 5856 | TAAGCCAGCTCTTGCAGTC |
| 5857 | ACTGCAAGAGCTGGCTTAG | 5858 | CTAAGCCAGCTCTTGCAGT |
| 5859 | CTGCAAGAGCTGGCTTAGG | 5860 | CCTAAGCCAGCTCTTGCAG |
| 5861 | TGCAAGAGCTGGCTTAGGG | 5862 | CCCTAAGCCAGCTCTTGCA |
| 5863 | GCAAGAGCTGGCTTAGGGA | 5864 | TCCCTAAGCCAGCTCTTGC |
| 5865 | CAAGAGCTGGCTTAGGGAC | 5866 | GTCCCTAAGCCAGCTCTTG |
| 5867 | AAGAGCTGGCTTAGGGACT | 5868 | AGTCCCTAAGCCAGCTCTT |
| 5869 | AGAGCTGGCTTAGGGACTT | 5870 | AAGTCCCTAAGCCAGCTCT |
| 5871 | GAGCTGGCTTAGGGACTTC | 5872 | GAAGTCCCTAAGCCAGCTC |
| 5873 | AGCTGGCTTAGGGACTTCC | 5874 | GGAAGTCCCTAAGCCAGCT |
| 5875 | GCTGGCTTAGGGACTTCCT | 5876 | AGGAAGTCCCTAAGCCAGC |
| 5877 | CTGGCTTAGGGACTTCCTG | 5878 | CAGGAAGTCCCTAAGCCAG |
| 5879 | TGGCTTAGGGACTTCCTGA | 5880 | TCAGGAAGTCCCTAAGCCA |
| 5881 | GGCTTAGGGACTTCCTGAT | 5882 | ATCAGGAAGTCCCTAAGCC |
| 5883 | GCTTAGGGACTTCCTGATG | 5884 | CATCAGGAAGTCCCTAAGC |
| 5885 | CTTAGGGACTTCCTGATGC | 5886 | GCATCAGGAAGTCCCTAAG |
| 5887 | TTAGGGACTTCCTGATGCA | 5888 | TGCATCAGGAAGTCCCTAA |
| 5889 | TAGGGACTTCCTGATGCAC | 5890 | GTGCATCAGGAAGTCCCTA |
| 5891 | AGGGACTTCCTGATGCACA | 5892 | TGTGCATCAGGAAGTCCCT |
| 5893 | GGGACTTCCTGATGCACAG | 5894 | CTGTGCATCAGGAAGTCCC |
| 5895 | GGACTTCCTGATGCACAGG | 5896 | CCTGTGCATCAGGAAGTCC |
| 5897 | GACTTCCTGATGCACAGGA | 5898 | TCCTGTGCATCAGGAAGTC |
| 5899 | ACTTCCTGATGCACAGGAA | 5900 | TTCCTGTGCATCAGGAAGT |
| 5901 | CTTCCTGATGCACAGGAAG | 5902 | CTTCCTGTGCATCAGGAAG |
| 5903 | TTCCTGATGCACAGGAAGA | 5904 | TCTTCCTGTGCATCAGGAA |
| 5905 | TCCTGATGCACAGGAAGAA | 5906 | TTCTTCCTGTGCATCAGGA |
| 5907 | CCTGATGCACAGGAAGAAG | 5908 | CTTCTTCCTGTGCATCAGG |
| 5909 | CTGATGCACAGGAAGAAGA | 5910 | TCTTCTTCCTGTGCATCAG |
| 5911 | TGATGCACAGGAAGAAGAG | 5912 | CTCTTCTTCCTGTGCATCA |
| 5913 | GATGCACAGGAAGAAGAGG | 5914 | CCTCTTCTTCCTGTGCATC |
| 5915 | ATGCACAGGAAGAAGAGGC | 5916 | GCCTCTTCTTCCTGTGCAT |
| 5917 | TGCACAGGAAGAAGAGGCT | 5918 | AGCCTCTTCTTCCTGTGCA |
| 5919 | GCACAGGAAGAAGAGGCTG | 5920 | CAGCCTCTTCTTCCTGTGC |
| 5921 | CACAGGAAGAAGAGGCTGG | 5922 | CCAGCCTCTTCTTCCTGTG |
| 5923 | ACAGGAAGAAGAGGCTGGA | 5924 | TCCAGCCTCTTCTTCCTGT |
| 5925 | CAGGAAGAAGAGGCTGGAA | 5926 | TTCCAGCCTCTTCTTCCTG |
| 5927 | AGGAAGAAGAGGCTGGAAC | 5928 | GTTCCAGCCTCTTCTTCCT |
| 5929 | GGAAGAAGAGGCTGGAACC | 5930 | GGTTCCAGCCTCTTCTTCC |
| 5931 | GAAGAAGAGGCTGGAACCC | 5932 | GGGTTCCAGCCTCTTCTTC |
| 5933 | AAGAAGAGGCTGGAACCCA | 5934 | TGGGTTCCAGCCTCTTCTT |
| 5935 | AGAAGAGGCTGGAACCCAC | 5936 | GTGGGTTCCAGCCTCTTCT |
| 5937 | GAAGAGGCTGGAACCCACA | 5938 | TGTGGGTTCCAGCCTCTTC |
| 5939 | AAGAGGCTGGAACCCACAG | 5940 | CTGTGGGTTCCAGCCTCTT |
| 5941 | AGAGGCTGGAACCCACAGC | 5942 | GCTGTGGGTTCCAGCCTCT |
| 5943 | GAGGCTGGAACCCACAGCA | 5944 | TGCTGTGGGTTCCAGCCTC |
| 5945 | AGGCTGGAACCCACAGCAC | 5946 | GTGCTGTGGGTTCCAGCCT |
| 5947 | GGCTGGAACCCACAGCACC | 5948 | GGTGCTGTGGGTTCCAGCC |
| 5949 | GCTGGAACCCACAGCACCA | 5950 | TGGTGCTGTGGGTTCCAGC |
| 5951 | CTGGAACCCACAGCACCAC | 5952 | GTGGTGCTGTGGGTTCCAG |
| 5953 | TGGAACCCACAGCACCACC | 5954 | GGTGGTGCTGTGGGTTCCA |
| 5955 | GGAACCCACAGCACCACCC | 5956 | GGGTGGTGCTGTGGGTTCC |
| 5957 | GAACCCACAGCACCACCCA | 5958 | TGGGTGGTGCTGTGGGTTC |
| 5959 | AACCCACAGCACCACCCAC | 5960 | GTGGGTGGTGCTGTGGGTT |
| 5961 | ACCCACAGCACCACCCACC | 5962 | GGTGGGTGGTGCTGTGGGT |
| 5963 | CCCACAGCACCACCCACCA | 5964 | TGGTGGGTGGTGCTGTGGG |
| 5965 | CCACAGCACCACCCACCAT | 5966 | ATGGTGGGTGGTGCTGTGG |
| 5967 | CACAGCACCACCCACCATG | 5968 | CATGGTGGGTGGTGCTGTG |
| 5969 | ACAGCACCACCCACCATGG | 5970 | CCATGGTGGGTGGTGCTGT |
| 5971 | CAGCACCACCCACCATGGC | 5972 | GCCATGGTGGGTGGTGCTG |
| 5973 | AGCACCACCCACCATGGCC | 5974 | GGCCATGGTGGGTGGTGCT |
| 5975 | GCACCACCCACCATGGCCC | 5976 | GGGCCATGGTGGGTGGTGC |
| 5977 | CACCACCCACCATGGCCCC | 5978 | GGGGCCATGGTGGGTGGTG |
| 5979 | ACCACCCACCATGGCCCCA | 5980 | TGGGGCCATGGTGGGTGGT |
| 5981 | CCACCCACCATGGCCCCAG | 5982 | CTGGGGCCATGGTGGGTGG |
| 5983 | CACCCACCATGGCCCCAGG | 5984 | CCTGGGGCCATGGTGGGTG |
| 5985 | ACCCACCATGGCCCCAGGC | 5986 | GCCTGGGGCCATGGTGGGT |
| 5987 | CCCACCATGGCCCCAGGCT | 5988 | AGCCTGGGGCCATGGTGGG |
| 5989 | CCACCATGGCCCCAGGCTT | 5990 | AAGCCTGGGGCCATGGTGG |
| 5991 | CACCATGGCCCCAGGCTTA | 5992 | TAAGCCTGGGGCCATGGTG |
| 5993 | ACCATGGCCCCAGGCTTAG | 5994 | CTAAGCCTGGGGCCATGGT |
| 5995 | CCATGGCCCCAGGCTTAGC | 5996 | GCTAAGCCTGGGGCCATGG |
| 5997 | CATGGCCCCAGGCTTAGCT | 5998 | AGCTAAGCCTGGGGCCATG |
| 5999 | ATGGCCCCAGGCTTAGCTC | 6000 | GAGCTAAGCCTGGGGCCAT |
| 6001 | TGGCCCCAGGCTTAGCTCA | 6002 | TGAGCTAAGCCTGGGGCCA |
| 6003 | GGCCCCAGGCTTAGCTCAA | 6004 | TTGAGCTAAGCCTGGGGCC |
| 6005 | GCCCCAGGCTTAGCTCAAC | 6006 | GTTGAGCTAAGCCTGGGGC |
| 6007 | CCCCAGGCTTAGCTCAACC | 6008 | GGTTGAGCTAAGCCTGGGG |
| 6009 | CCCAGGCTTAGCTCAACCC | 6010 | GGGTTGAGCTAAGCCTGGG |
| 6011 | CCAGGCTTAGCTCAACCCA | 6012 | TGGGTTGAGCTAAGCCTGG |
| 6013 | CAGGCTTAGCTCAACCCAA | 6014 | TTGGGTTGAGCTAAGCCTG |
| 6015 | AGGCTTAGCTCAACCCAAA | 6016 | TTTGGGTTGAGCTAAGCCT |
| 6017 | GGCTTAGCTCAACCCAAAG | 6018 | CTTTGGGTTGAGCTAAGCC |
| 6019 | GCTTAGCTCAACCCAAAGC | 6020 | GCTTTGGGTTGAGCTAAGC |
| 6021 | CTTAGCTCAACCCAAAGCC | 6022 | GGCTTTGGGTTGAGCTAAG |
| 6023 | TTAGCTCAACCCAAAGCCA | 6024 | TGGCTTTGGGTTGAGCTAA |
| 6025 | TAGCTCAACCCAAAGCCAT | 6026 | ATGGCTTTGGGTTGAGCTA |
| 6027 | AGCTCAACCCAAAGCCATA | 6028 | TATGGCTTTGGGTTGAGCT |
| 6029 | GCTCAACCCAAAGCCATAG | 6030 | CTATGGCTTTGGGTTGAGC |
| 6031 | CTCAACCCAAAGCCATAGC | 6032 | GCTATGGCTTTGGGTTGAG |
| 6033 | TCAACCCAAAGCCATAGCC | 6034 | GGCTATGGCTTTGGGTTGA |
| 6035 | CAACCCAAAGCCATAGCCA | 6036 | TGGCTATGGCTTTGGGTTG |
| 6037 | AACCCAAAGCCATAGCCAC | 6038 | GTGGCTATGGCTTTGGGTT |
| 6039 | ACCCAAAGCCATAGCCACC | 6040 | GGTGGCTATGGCTTTGGGT |
| 6041 | CCCAAAGCCATAGCCACCA | 6042 | TGGTGGCTATGGCTTTGGG |
| 6043 | CCAAAGCCATAGCCACCAC | 6044 | GTGGTGGCTATGGCTTTGG |
| 6045 | CAAAGCCATAGCCACCACC | 6046 | GGTGGTGGCTATGGCTTTG |
| 6047 | AAAGCCATAGCCACCACCC | 6048 | GGGTGGTGGCTATGGCTTT |
| 6049 | AAGCCATAGCCACCACCCT | 6050 | AGGGTGGTGGCTATGGCTT |
| 6051 | AGCCATAGCCACCACCCTC | 6052 | GAGGGTGGTGGCTATGGCT |
| 6053 | GCCATAGCCACCACCCTCA | 6054 | TGAGGGTGGTGGCTATGGC |
| 6055 | CCATAGCCACCACCCTCAG | 6056 | CTGAGGGTGGTGGCTATGG |
| 6057 | CATAGCCACCACCCTCAGT | 6058 | ACTGAGGGTGGTGGCTATG |
| 6059 | ATAGCCACCACCCTCAGTC | 6060 | GACTGAGGGTGGTGGCTAT |
| 6061 | TAGCCACCACCCTCAGTCC | 6062 | GGACTGAGGGTGGTGGCTA |
| 6063 | AGCCACCACCCTCAGTCCC | 6064 | GGGACTGAGGGTGGTGGCT |
| 6065 | GCCACCACCCTCAGTCCCT | 6066 | AGGGACTGAGGGTGGTGGC |
| 6067 | CCACCACCCTCAGTCCCTG | 6068 | CAGGGACTGAGGGTGGTGG |
| 6069 | CACCACCCTCAGTCCCTGG | 6070 | CCAGGGACTGAGGGTGGTG |
| 6071 | ACCACCCTCAGTCCCTGGA | 6072 | TCCAGGGACTGAGGGTGGT |
| 6073 | CCACCCTCAGTCCCTGGAG | 6074 | CTCCAGGGACTGAGGGTGG |
| 6075 | CACCCTCAGTCCCTGGAGC | 6076 | GCTCCAGGGACTGAGGGTG |
| 6077 | ACCCTCAGTCCCTGGAGCT | 6078 | AGCTCCAGGGACTGAGGGT |
| 6079 | CCCTCAGTCCCTGGAGCTT | 6080 | AAGCTCCAGGGACTGAGGG |
| 6081 | CCTCAGTCCCTGGAGCTTC | 6082 | GAAGCTCCAGGGACTGAGG |
| 6083 | CTCAGTCCCTGGAGCTTCC | 6084 | GGAAGCTCCAGGGACTGAG |
| 6085 | TCAGTCCCTGGAGCTTCCT | 6086 | AGGAAGCTCCAGGGACTGA |
| 6087 | CAGTCCCTGGAGCTTCCTC | 6088 | GAGGAAGCTCCAGGGACTG |
| 6089 | AGTCCCTGGAGCTTCCTCA | 6090 | TGAGGAAGCTCCAGGGACT |
| 6091 | GTCCCTGGAGCTTCCTCAT | 6092 | ATGAGGAAGCTCCAGGGAC |
| 6093 | TCCCTGGAGCTTCCTCATC | 6094 | GATGAGGAAGCTCCAGGGA |
| 6095 | CCCTGGAGCTTCCTCATCA | 6096 | TGATGAGGAAGCTCCAGGG |
| 6097 | CCTGGAGCTTCCTCATCAT | 6098 | ATGATGAGGAAGCTCCAGG |
| 6099 | CTGGAGCTTCCTCATCATC | 6100 | GATGATGAGGAAGCTCCAG |
| 6101 | TGGAGCTTCCTCATCATCC | 6102 | GGATGATGAGGAAGCTCCA |
| 6103 | GGAGCTTCCTCATCATCCT | 6104 | AGGATGATGAGGAAGCTCC |
| 6105 | GAGCTTCCTCATCATCCTC | 6106 | GAGGATGATGAGGAAGCTC |
| 6107 | AGCTTCCTCATCATCCTCT | 6108 | AGAGGATGATGAGGAAGCT |
| 6109 | GCTTCCTCATCATCCTCTG | 6110 | CAGAGGATGATGAGGAAGC |
| 6111 | CTTCCTCATCATCCTCTGC | 6112 | GCAGAGGATGATGAGGAAG |
| 6113 | TTCCTCATCATCCTCTGCT | 6114 | AGCAGAGGATGATGAGGAA |
| 6115 | TCCTCATCATCCTCTGCTT | 6116 | AAGCAGAGGATGATGAGGA |
| 6117 | CCTCATCATCCTCTGCTTC | 6118 | GAAGCAGAGGATGATGAGG |
| 6119 | CTCATCATCCTCTGCTTCA | 6120 | TGAAGCAGAGGATGATGAG |
| 6121 | TCATCATCCTCTGCTTCAT | 6122 | ATGAAGCAGAGGATGATGA |
| 6123 | CATCATCCTCTGCTTCATC | 6124 | GATGAAGCAGAGGATGATG |
| 6125 | ATCATCCTCTGCTTCATCC | 6126 | GGATGAAGCAGAGGATGAT |
| 6127 | TCATCCTCTGCTTCATCCT | 6128 | AGGATGAAGCAGAGGATGA |
| 6129 | CATCCTCTGCTTCATCCTC | 6130 | GAGGATGAAGCAGAGGATG |
| 6131 | ATCCTCTGCTTCATCCTCC | 6132 | GGAGGATGAAGCAGAGGAT |
| 6133 | TCCTCTGCTTCATCCTCCC | 6134 | GGGAGGATGAAGCAGAGGA |
| 6135 | CCTCTGCTTCATCCTCCCT | 6136 | AGGGAGGATGAAGCAGAGG |
| 6137 | CTCTGCTTCATCCTCCCTG | 6138 | CAGGGAGGATGAAGCAGAG |
| 6139 | TCTGCTTCATCCTCCCTGG | 6140 | CCAGGGAGGATGAAGCAGA |
| 6141 | CTGCTTCATCCTCCCTGGC | 6142 | GCCAGGGAGGATGAAGCAG |
| 6143 | TGCTTCATCCTCCCTGGCA | 6144 | TGCCAGGGAGGATGAAGCA |
| 6145 | GCTTCATCCTCCCTGGCAT | 6146 | ATGCCAGGGAGGATGAAGC |
| 6147 | CTTCATCCTCCCTGGCATC | 6148 | GATGCCAGGGAGGATGAAG |
| 6149 | TTCATCCTCCCTGGCATCT | 6150 | AGATGCCAGGGAGGATGAA |
| 6151 | TCATCCTCCCTGGCATCTG | 6152 | CAGATGCCAGGGAGGATGA |

[0342] Results

[0343] To determine the genetic architecture of AA taking an unbiased approach in a large cohort of patients, we initiated a GWAS by selecting a discovery cohort of 256 patients with severe phenotype (AU) (FIG. 1) who reported a family history of AA and low age of onset. Cases were ascertained through the National Alopecia Areata Registry (NAAR)^{N9} and allele frequencies were compared to previously genotyped controls.^{N10} Genome-wide association tests adjusted for residual population stratification (λ=1.036) identified 53 SNPs significantly associated with AA (p≦5×10⁻⁷), half of which were located within the HLA. For our replication study, we next genotyped a cohort of 832 NAAR patients, containing all subsets of disease severity. Controls were obtained from CGEMS (http://cgems.cancer.gov/data/).^{N11,N12} Genome-wide association tests adjusted for residual population stratification (λ=1.032) identified 93 SNPs which were significantly associated with AA (p≦5×10⁻⁷). Finally, we performed a joint analysis of the 1055 AA cases and 3278 controls, and genome-wide association tests adjusted for residual population stratification (λ=1.051) identified 141 SNPs that exceeded genome-wide significance (p≦5×10⁻⁷) (FIG. 1, Table 2).

[0344] Our analysis uncovered at least ten susceptibility loci for AA, the majority of which clustered into six genomic regions and fell within discrete haplotype blocks (FIG. 2, Table 3). These include loci on chromosome 2q33.2 containing the CTLA4 gene; 4q27 containing the IL-2/IL-21 locus; 6p21.32 containing the HLA region; 6q25.1 which harbors the ULBP genes; 10p15.1 containing IL-2RA; and 12q13 containing Eos (IKZF4). Two of the remaining individual SNPs fell into discrete regions; one is located on chromosome 9q31.1 within an intron of syntaxin 17 (STX17), and the second is located on chromosome 11q13, upstream from peroxiredoxin 5 (PRDX5). Two individual SNPs in our study are also located within gene deserts. One SNP (rs361147) falls within a 560 Kb region on chromosome 4q31.3, and is bounded by the PET112L and FBXW7 genes. The second SNP (rs10053502) lies within a 1.2 Mb region on chromosome 5p13.1, and is flanked by the DAB2 and PTGER4 genes. To assess additional regions that may exceed significance in future replication studies, we identified an additional 163 SNPs that were nominally significant (1×10⁻⁴<p≦5×10⁻⁷). Interestingly, these loci implicate 12 additional genes involved in the immune response, inflammation, and/or have been implicated in other autoimmune diseases, notably, IL13, IL6, IL26, IFNG, SOCS1 and PTPN2 (Table 2, Table 4). Finally, imputation analysis identified additional statistically significant SNPs within each of the 10 regions that exceeded significance (listed above) and one additional SNP in PTPN2 that raised it above statistical significance (p=3.38×10⁻⁷) (Table 4).

[0345] We next sought to determine the distribution of risk alleles in AA and assess the extent to which they contribute to disease. First, we reduced redundancy in our association evidence by utilizing conditional analysis to determine which SNPs represent independent risk factors within the regions we identified (FIG. 5). This analysis reduced the 141 significantly associated SNPs to a set of 18 risk haplotypes (FIG. 3 and Table 3). For each haplotype, we chose a single marker as a proxy for the haplotype. In order to assess the distribution of risk haplotypes among our cohort of AA patients and controls, we devised a new test statistic, designated as the Genetic Liability Index (GLI). Strikingly, the distribution of risk alleles is significantly different between cases and controls, wherein AA patients carry an average of 18 risk alleles, versus 14 in control individuals (FIG. 3). It is notable that the median odds ratio (OR) for our minimally redundant set of SNPs is 1.5 (ranging from 1.32-8.84), indicating stronger effects than are identified by GWAS (median OR 1.33).^{N13} To determine the relative contribution of different alleles to the genetic burden of AA, population attributable risks were calculated for genotypes of individual SNPs and show very large contributions to risk from individual alleles (ranging from 16%-91%) (Table 5). Together with the high risk in siblings,^{N5,N6} these findings document unequivocally an overwhelming contribution of risk from genetic factors in AA, and await confirmation in a validation study.

[0346] Our GWAS study in AA is the first to implicate the ULBP genes in any autoimmune disease. These ligands were originally named RAET genes (retinoic acid early transcript loci) in the mouse and ULBP (cytomegalovirus UL16-binding protein) in the human. ULBP1-6 reside in a 180 kb MHC Class I related cluster of six genes on human chromosome 6q24 that is believed to have arisen by several duplication events from the MHC locus on chromosome 6p.^{N14} Our GWAS results point to the specific haplotype block containing ULBP3 and ULBP6 as being strongly implicated in AA (FIG. 3). Importantly, each of the ULBP genes has been shown to function as a bona fide NKG2D activating ligand.^{N15,N16} NKG2D ligands, including the MICA/B genes and ULBPs, are stress-induced molecules that act as ‘danger signals’ to alert NK, NKT, δγ T, Tregs and CD8+ T lymphocytes through the engagement of the receptor NKG2D.^{N15}

[0347] Perturbations in the hair follicle microenvironment itself contributes to the initiation of AA. NKG2D ligands, therefore, if overexpressed in genetically susceptible individuals, can trigger an autoimmune response against the tissue or organ expressing the ligand.^{N17} To probe this in the setting of AA, we examined the distribution of ULBP3 protein within the hair follicle of unaffected scalp (FIGS. 4A-B) and in the hair follicles of AA patients (FIGS. 4C-D). Whereas ULBP is expressed at low levels with the hair follicle dermal papilla in normal hair follicles (FIGS. 4A-B), strikingly, in two different patients with early active AA lesions, we observed marked upregulation of ULBP3 expression in the dermal sheath as well as the dermal papilla (FIGS. 4B-C). We then replicated this finding in a cohort of 16 independent AA patients from various stages of disease compared with scalp biopsies of 7 control individuals. Quantitative immunohistomorphometry corroborated a significantly increased number of ULBP3 positive cells in the dermal sheath and dermis in AA skin samples compared to controls (FIG. 4P). A massive inflammatory cell infiltrate was noted within the dermal sheath characterized by CD8+CD3+ T cells (FIGS. 4G-L), but only rare NK cells. Finally, double immunostaining with an anti-CD8 and an anti-NKG2D antibodies revealed that most CD8+ T cells co-expressed NKG2D (FIGS. 4M-O). The autoimmune attack in AA region is mediated by CD8+NKG2D+ cytotoxic T cells of which infiltration may be induced by upregulation of the NKG2D ligand ULBP3 in the dermal sheath of the HF. Ectopic and excessive expression of ULBP3 in the dermal sheath of the hair follicle in active lesions may be one of the most significant abnormalities of the HF signaling landscape in AA.

[0348] The localization of an NK activating ligand in the outermost layer of the hair follicle places it in an ideal position to express a ‘danger signal’ and engage NKG2D on immune cells in the local milieu. Transient inducible overexpression of another NKG2D ligand, Rae-1, in the epidermis of mice was previously shown to dramatically alter the immune landscape within the skin^{N18}, suggesting that the acute upregulation of ULBP3 in response to stress or danger may have a similar effect on initiating hair follicle autoimmunity in AA. Consistent with these findings, Ito and colleagues demonstrated a massive upregulation of the NK ligand MIC/A in the hair follicles of patients with AA.^{N4} Taken together with the increased numbers of perifollicular NKG2D+ CD8+ cells that we and others observed in lesional skin of AA patients (FIG. 4),^{N19,N20} these data implicate a new mechanism involving recruitment of NKG2D-expressing cells in the etiology of AA, which may contribute to the collapse of immune privilege of the hair follicle.

[0349] In addition to ULBP3/ULBP6, we identified several other genes that are expressed in the hair follicle and may provide insight into the initiating events (FIG. 6 and FIG. 7). For example, syntaxin 17 (STX17) (p=3.60×10⁻⁷) is widely though weakly expressed in the hair follicle.^{N21} This gene is associated with the grey hair phenotype in horses, which is of interest because AA is known to attack pigmented hair follicles.^{N22} Peroxiredoxin 5 (PRDX5) (p=4.14×10⁻⁷), is an antioxidant enzyme involved in the cellular response to oxidative stress that has been implicated in the degeneration of the target cells (astrocytes) of another autoimmune disorder, MS.^{N23} The prostaglandin E4 (EP4) receptor (PTGER4) is highly expressed in the hair follicle outer root sheath, inner root sheath and cortex, as well as the interfollicular epidermis.^{N24} Another SNP in our GWAS resides in a gene desert identified in Crohn's disease^{N25,N26} and multiple sclerosis^{N27} and shown to contain a regulator of PTGER4 gene expression. Prostaglandin E2-EP4 signaling plays a key role in the initiation of skin immune responses by promoting the migration of Langerhans cells, increasing their expression of costimulatory molecules and amplifying their ability to stimulate T cells.^{N28} Taken together, we found evidence for several genes whose robust expression in the hair follicle could contribute to a disruption in the local milieu, resulting in the collapse of immune privilege and the onset of autoimmunity.

[0350] Discussion

[0351] The results of the GWAS implicate both innate and adaptive immunity in the pathogenesis of disease in AA (Table 1). In Table 1, each of the 10 regions that display significant association to AA were summarized. For each gene implicated by this study, diseases are listed for which a GWAS or previous candidate gene study identified the same region. Information is obtained from the Human Genetic Epidemiology Navigator (www.huge navigator.net) and the OPG catalogue of GWAS (www.genome.gov).

[0352] The data further implicate several factors that conspire to induce and promote immune dysregulation in the pathogenesis of AA. Strong evidence was found for genes involved in the differentiation and maintenance of both immunosuppressive Tregs, as well as their functional antagonists, pro-inflammatory T helper cells (Th17). Tregs play a critical role in preventing immune responses against autoantigens, and their differentiation depends on the early expression of IL2RA/CD25 (p=1.74×10⁻¹²), as well as a key lineage-determining transcription factor, Foxp3. Foxp3-mediated gene silencing is critical in determining that Tregs effectively suppress immune responses.^{N29} Both IL-2 (p=4.27×10⁻⁰⁸) and its high affinity receptor IL-2RA (p=1.74×10⁻¹²) play a central role in controlling the survival and proliferation of Tregs. Eos (IKZF4) (p=3.21×10⁻⁸), a member of the Ikaros family of transcription factors, is a key co-regulator of FoxP3 directed gene silencing during Treg differentiation. While Tregs utilize several different mechanisms to suppress immune responses, the high expression of CTLA4 (p=3.55×10⁻¹³), may be a major determinant of their suppressive activity, particularly since CTLA4 is essential for the inhibitory activity of Tregs on antigen presenting cells.^{N30} The IL-2 locus is tightly linked with IL-21 (p=4.27×10⁻⁰⁸), which has pleiotropic effects on multiple cell lineages, including CD8+ T cells, B cells, NK cells, and dendritic cells. IL-21 is a major product of proinflammatory Th17 (IL-17-producing CD4(+) T helper cells) and has been shown to play a key role in both promoting the differentiation of Th17 cells as well as limiting the differentiation of Tregs.^{N31} Collectively, the constellation of immunoregulatory genes implicated in AA shift the focus squarely on the importance of Tregs and Th17 cells as targets for future studies and therapeutic targeting.

[0353] The ‘common cause hypothesis’ of autoimmune diseases has received tremendous validation from GWAS in recent years.^{N32} This hypothesis evolved initially from epidemiological studies that demonstrated the aggregation of different autoimmune diseases within families and was further supported by the finding of common susceptibility regions in linkage studies. Our G WAS upheld the previously reported robust associations of HLA genes in AA and other autoimmune disorders, in particular, HLA-DRA (p=2.93×10⁻³¹ and HLA-DQA2 (p=1.38×10⁻³⁵), as well as a report of MICA and NOTCH4, and outside the HLA, PTPN22 (p=1.98×10⁴) (reviewed in^{N3}), whereas we did not find evidence for any of the other loci previously tested in AA using the candidate gene approach (Table 6). Prior to this GWAS, we performed linkage analysis in a cohort of 28 AA families.^{N8} Our GWAS evidence coincides with linkage at the loci on 6p (HLA), 6q (ULBPs), 10p (IL2RA), and 18p (PTPN2). In accordance with the common cause hypothesis, our GWAS revealed a number of risk loci in common with other forms of autoimmunity, such as rheumatoid arthritis (RA), type I diabetes (T1D), celiac disease (CeD), systemic lupus erythematosus (SLE), multiple sclerosis (MS) and psoriasis (PS), in particular, CTLA4, IL2/IL2RA, IL21 and genes critical to Treg maintenance (Table 1, Table 3, Table 4). The commonality with RA, T1D, and CeD in particular, is especially noteworthy in light of the significance of the NKG2D receptor in the pathogenesis of each of these three diseases.^{N17}

[0354] Our GWAS establishes the genetic basis of AA for the first time, revealing at least 10 loci that contribute to disease. These findings open new avenues of exploration for therapy based on the underlying mechanisms of AA with a focus not only on T cell subsets and mechanisms common to other forms of autoimmunity, but also on unique mechanisms that involve signaling pathways downstream of the NKG2D receptor.

TABLE 1
Genes with significant association to AA.

| | | | Stongest | Maximum | |
|---|---|---|---|---|---|
| | | | association | odds | |
| Region | Gene | Function | (pvalue) | ratio | Involved in other autoimmune disease |
| 2q33.2 | CTLA4 | T-cell proliferation | 3.55 × 10⁻¹³ | 1.44 | T1D, RA, CeD, MS, SLE, GD |
| | ICOS | T-cell proliferation | 4.33 × 10⁻⁰⁸ | 1.32 | |
| 4q27 | IL21/IL2 | T-, B- and NK-cell | 4.27 × 10⁻⁰⁸ | 1.34 | T1D, RA, CeD, PS |
| | | proliferation | | | |
| 6q25.1 | ULBP6 | NKG2D activating ligand | 4.49 × 10⁻¹⁹ | 1.65 | none |
| | ULBP3 | NKG2D activating ligand | 4.43 × 10⁻¹⁷ | 1.52 | none |
| 9q31.1 | STX17 | premature hair graying | 3.60 × 10⁻⁰⁷ | 1.33 | none |
| 10p15.1 | IL2RA | T-cell proliferation | 1.74 × 10⁻¹² | 1.41 | T1D, MS, GD |
| 11q13 | PRDX5 | antioxidant enzyme | 4.14 × 10⁻⁰⁷ | 1.33 | MS |
| 12q13 | Eos | T-cell proliferation | 3.21 × 10⁻⁰⁸ | 1.34 | T1D, SLE |
| | (IKZF4) | | | | |
| 6p21.32 | MICA | NK cell activation | 1.19 × 10⁻⁰⁷ | 1.44 | T1D, RA, CeD, UC, PS, SLE |
| (HLA) | NOTCH4 | T-cell differentiation | 1.03 × 10⁻⁰⁸ | 1.61 | T1D, RA, MS |
| | C6orf10 | | 1.45 × 10⁻¹⁶ | 2.36 | T1D, RA, PS |
| | BTNL2 | T-cell proliferation | 2.11 × 10⁻²⁶ | 2.7 | T1D, RA, UC, CD, SLE, MS |
| | HLA-DRA | Antigen presentation | 2.93 × 10⁻³¹ | 2.62 | T1D, RA, CeD, MS |
| | HLA-DQA1 | Antigen presentation | 3.60 × 10⁻¹⁷ | 2.15 | T1D, RA, CeD, MS, SLE, PS, CD, UC, GD |
| | HLA-DQA2 | Antigen presentation | 1.38 × 10⁻³⁵ | 5.43 | T1D, RA |
| | HLA-DQB2 | Antigen presentation | 1.73 × 10⁻¹³ | 1.6 | RA |
| | HLA-DOB | Antigen presentation | 2.07 × 10⁻⁰⁸ | 1.72 | |

[0355] The p-value of the most significant SNP, and the OR for the SNP with the largest effect estimate are listed. Diseases are listed for which a GWAS or previous candidate gene study identified the same region: type I diabetes (T1D), rheumatoid arthritis (RA), celiac disease (CeD), multiple sclerosis (MS), system lupus erythematosus (SLE), Graves disease (GD), psoriasis (PS), Crohn's disease (CD), and ulcerative colitis (UC).

TABLE 2
Association results for SNPs that exceed significance level of p = 1 × 10⁻⁴.

| | | | | | Refer- | | | | 95% | 95% |
|---|---|---|---|---|---|---|---|---|---|---|
| | | position | Gene | | ence | MAF | MAF | Odds | CI | CI |
| Chr | SNP | (bp) | Symbol | pvalue | allele | controls | cases | Ratio | lower | upper |
| 1 | rs2275909 | 6,991,259 | CAMTA1 | 8.77E−06 | G | 0.31 | 0.36 | 1.28 | 1.15 | 1.42 |
| 1 | rs12060498 | 166,053,889 | SAC | 8.31E−05 | A | 0.17 | 0.13 | 0.74 | 0.64 | 0.86 |
| 1 | rs16828608 | 176,396,522 | RASAL2 | 1.04E−05 | A | 0.09 | 0.13 | 1.43 | 1.23 | 1.67 |
| 1 | rs6701848 | 176,423,439 | RASAL2 | 4.16E−05 | C | 0.09 | 0.12 | 1.40 | 1.20 | 1.64 |
| 1 | rs12036491 | 176,430,274 | RASAL2 | 8.03E−05 | A | 0.09 | 0.12 | 1.39 | 1.19 | 1.62 |
| 1 | rs11590951 | 176,589,380 | RASAL2 | 5.18E−06 | A | 0.09 | 0.12 | 1.46 | 1.25 | 1.72 |
| 1 | rs12161419 | 176,645,663 | RASAL2 | 8.72E−05 | C | 0.09 | 0.12 | 1.39 | 1.18 | 1.62 |
| 2 | rs952810 | 7,287,647 | RNF144 | 8.26E−05 | G | 0.38 | 0.43 | 1.24 | 1.12 | 1.37 |
| 2 | rs12986962 | 111,525,029 | ACOXL | 8.67E−05 | G | 0.37 | 0.32 | 0.80 | 0.72 | 0.89 |
| 2 | rs231735 | 204,402,121 | CTLA4 | 5.75E−10 | C | 0.48 | 0.40 | 0.72 | 0.65 | 0.80 |
| 2 | rs231804 | 204,416,891 | CTLA4 | 4.97E−10 | G | 0.42 | 0.35 | 0.71 | 0.64 | 0.79 |
| 2 | rs1024161 | 204,429,997 | CTLA4 | 3.55E−13 | A | 0.40 | 0.49 | 1.47 | 1.33 | 1.62 |
| 2 | rs926169 | 204,430,997 | CTLA4 | 5.50E−11 | A | 0.39 | 0.47 | 1.41 | 1.28 | 1.56 |
| 2 | rs733618 | 204,439,189 | CTLA4 | 8.26E−06 | G | 0.08 | 0.11 | 1.46 | 1.24 | 1.72 |
| 2 | rs231726 | 204,449,111 | CTLA4 | 1.94E−10 | A | 0.32 | 0.39 | 1.41 | 1.27 | 1.57 |
| 2 | rs10497873 | 204,470,572 | CTLA4 | 7.65E−07 | A | 0.22 | 0.17 | 0.72 | 0.63 | 0.82 |
| 2 | rs3096851 | 204,472,127 | CTLA4 | 3.58E−08 | C | 0.31 | 0.37 | 1.35 | 1.22 | 1.50 |
| 2 | rs3116504 | 204,477,299 | CTLA4 | 3.73E−08 | G | 0.31 | 0.37 | 1.35 | 1.22 | 1.50 |
| 2 | rs3096866 | 204,503,197 | ICOS | 4.33E−08 | G | 0.31 | 0.38 | 1.35 | 1.22 | 1.50 |
| 2 | rs10490186 | 230,189,779 | DNER | 7.51E−05 | G | 0.35 | 0.40 | 1.23 | 1.12 | 1.37 |
| 2 | rs1531968 | 240,025,939 | HDAC4 | 8.10E−05 | G | 0.37 | 0.31 | 0.81 | 0.73 | 0.89 |
| 3 | rs13088671 | 32,334,657 | CKLFSF8 | 9.27E−05 | A | 0.11 | 0.14 | 1.35 | 1.17 | 1.56 |
| 3 | rs4299518 | 45,784,277 | SLC6A20 | 1.03E−04 | G | 0.47 | 0.42 | 0.82 | 0.74 | 0.90 |
| 3 | rs3912834 | 55,017,401 | CACNA2D3 | 7.28E−05 | G | 0.15 | 0.12 | 0.74 | 0.63 | 0.85 |
| 3 | rs7638884 | 56,987,278 | SPATA12 | 3.87E−05 | A | 0.42 | 0.47 | 1.25 | 1.13 | 1.38 |
| 3 | rs9818327 | 118,337,491 | LSAMP | 2.03E−05 | A | 0.28 | 0.23 | 0.77 | 0.68 | 0.87 |
| 3 | rs7649284 | 118,364,404 | LSAMP | 4.74E−05 | G | 0.27 | 0.23 | 0.78 | 0.70 | 0.88 |
| 4 | rs6839274 | 3,130,428 | HD | 8.71E−05 | G | 0.11 | 0.08 | 0.70 | 0.59 | 0.84 |
| 4 | rs363097 | 3,147,057 | HD | 9.11E−05 | G | 0.12 | 0.09 | 0.71 | 0.60 | 0.84 |
| 4 | rs6822371 | 103,452,230 | SLC39A8 | 7.98E−05 | A | 0.37 | 0.32 | 0.81 | 0.73 | 0.90 |
| 4 | rs1526926 | 123,213,668 | TRPC3 | 4.46E−06 | C | 0.43 | 0.49 | 1.27 | 1.15 | 1.41 |
| 4 | rs3108402 | 123,218,902 | TRPC3 | 7.62E−06 | A | 0.26 | 0.21 | 0.75 | 0.67 | 0.85 |
| 4 | rs941130 | 123,221,219 | TRPC3 | 1.05E−05 | A | 0.26 | 0.22 | 0.76 | 0.67 | 0.86 |
| 4 | rs3108397 | 123,237,584 | TRPC3 | 1.61E−05 | A | 0.42 | 0.47 | 1.25 | 1.13 | 1.38 |
| 4 | rs3108396 | 123,241,010 | TRPC3 | 1.78E−05 | C | 0.36 | 0.32 | 0.79 | 0.71 | 0.88 |
| 4 | rs6534338 | 123,246,319 | TRPC3 | 2.33E−06 | A | 0.31 | 0.25 | 0.76 | 0.68 | 0.85 |
| 4 | rs7684834 | 123,260,318 | TRPC3 | 8.43E−07 | G | 0.38 | 0.45 | 1.30 | 1.17 | 1.43 |
| 4 | rs7683061 | 123,407,319 | Tenr | 5.42E−07 | A | 0.37 | 0.44 | 1.30 | 1.18 | 1.44 |
| 4 | rs1127348 | 123,500,310 | Tenr | 3.73E−05 | G | 0.22 | 0.18 | 0.76 | 0.67 | 0.86 |
| 4 | rs4492018 | 123,733,978 | IL21 | 2.72E−06 | A | 0.26 | 0.32 | 1.30 | 1.17 | 1.45 |
| 4 | rs7682241 | 123,743,325 | IL21 | 4.27E−08 | A | 0.34 | 0.40 | 1.34 | 1.21 | 1.48 |
| 4 | rs2221903 | 123,758,362 | IL21 | 5.36E−05 | G | 0.31 | 0.27 | 0.79 | 0.71 | 0.88 |
| 4 | rs17005931 | 123,765,098 | IL21 | 1.26E−05 | A | 0.26 | 0.32 | 1.28 | 1.15 | 1.43 |
| 4 | rs1398553 | 123,767,518 | IL21 | 5.21E−05 | A | 0.31 | 0.27 | 0.79 | 0.71 | 0.88 |
| 4 | rs6840978 | 123,774,157 | IL21 | 2.42E−05 | A | 0.21 | 0.16 | 0.75 | 0.65 | 0.85 |
| 4 | rs2137497 | 123,777,704 | IL21 | 5.34E−08 | A | 0.39 | 0.46 | 1.33 | 1.20 | 1.47 |
| 4 | rs13110000 | 123,797,510 | IL21 | 4.09E−05 | G | 0.41 | 0.36 | 0.80 | 0.72 | 0.89 |
| 4 | rs4833253 | 123,798,300 | IL21 | 8.44E−05 | G | 0.16 | 0.20 | 1.30 | 1.15 | 1.48 |
| 4 | rs6836610 | 123,821,147 | FLJ35630 | 7.70E−05 | A | 0.30 | 0.35 | 1.24 | 1.12 | 1.38 |
| 4 | rs309406 | 123,838,157 | FLJ35630 | 3.38E−05 | G | 0.42 | 0.36 | 0.80 | 0.72 | 0.89 |
| 4 | rs368931 | 123,851,047 | FLJ35630 | 7.29E−05 | C | 0.40 | 0.34 | 0.81 | 0.73 | 0.89 |
| 4 | rs309375 | 123,900,606 | FLJ35630 | 2.74E−05 | C | 0.42 | 0.36 | 0.80 | 0.72 | 0.88 |
| 4 | rs304652 | 124,301,671 | SPATA5 | 1.68E−05 | G | 0.15 | 0.20 | 1.33 | 1.17 | 1.51 |
| 4 | rs2201997 | 124,398,692 | SPATA5 | 1.84E−05 | C | 0.15 | 0.20 | 1.33 | 1.17 | 1.51 |
| 4 | rs7670452 | 124,404,063 | SPATA5 | 3.27E−05 | G | 0.15 | 0.20 | 1.32 | 1.16 | 1.50 |
| 4 | rs11735364 | 124,405,129 | SPATA5 | 9.84E−05 | A | 0.19 | 0.23 | 1.28 | 1.13 | 1.44 |
| 4 | rs6813125 | 124,489,366 | SPATA5 | 1.57E−05 | C | 0.17 | 0.22 | 1.32 | 1.16 | 1.49 |
| 4 | rs6841700 | 124,494,160 | SPATA5 | 4.92E−05 | C | 0.20 | 0.24 | 1.28 | 1.14 | 1.44 |
| 4 | rs6552275 | 179,246,616 | AGA | 8.71E−05 | A | 0.26 | 0.31 | 1.25 | 1.12 | 1.40 |
| 4 | rs902176 | 185,891,314 | MLF1IP | 8.95E−05 | A | 0.15 | 0.18 | 1.31 | 1.15 | 1.49 |
| 4 | rs6851816 | 185,891,831 | MLF1IP | 5.36E−05 | G | 0.17 | 0.21 | 1.30 | 1.15 | 1.48 |
| 5 | rs16895538 | 61,157,916 | FLJ37543 | 7.79E−05 | A | 0.12 | 0.15 | 1.34 | 1.16 | 1.54 |
| 5 | rs11746773 | 61,162,143 | FLJ37543 | 3.46E−05 | G | 0.09 | 0.13 | 1.39 | 1.19 | 1.62 |
| 5 | rs13153954 | 61,198,236 | FLJ37543 | 9.99E−05 | G | 0.14 | 0.18 | 1.31 | 1.15 | 1.49 |
| 5 | rs6859438 | 71,049,222 | CART | 9.17E−05 | A | 0.03 | 0.05 | 1.66 | 1.29 | 2.13 |
| 5 | rs1295686 | 132,023,742 | IL13 | 7.13E−06 | A | 0.20 | 0.25 | 1.31 | 1.17 | 1.47 |
| 5 | rs20541 | 132,023,863 | IL13 | 1.87E−06 | A | 0.20 | 0.25 | 1.34 | 1.19 | 1.50 |
| 5 | rs2285700 | 132,067,031 | KIF3A | 7.78E−05 | C | 0.26 | 0.31 | 1.25 | 1.12 | 1.39 |
| 5 | rs2074529 | 132,084,046 | KIF3A | 4.05E−05 | C | 0.27 | 0.31 | 1.26 | 1.13 | 1.40 |
| 5 | rs247459 | 133,410,355 | VDAC1 | 1.10E−05 | A | 0.22 | 0.27 | 1.30 | 1.16 | 1.46 |
| 5 | rs7702415 | 133,850,977 | PHF15 | 5.16E−05 | G | 0.22 | 0.26 | 1.28 | 1.14 | 1.43 |
| 5 | rs1421630 | 163,466,086 | MAT2B | 6.26E−05 | A | 0.32 | 0.27 | 0.79 | 0.71 | 0.88 |
| 6 | rs11967812 | 29,943,610 | HLA-G | 1.07E−04 | G | 0.04 | 0.06 | 1.57 | 1.26 | 1.96 |
| 6 | rs2524005 | 30,007,656 | HLA-A | 1.00E−04 | A | 0.20 | 0.13 | 0.72 | 0.62 | 0.84 |
| 6 | rs2428521 | 30,036,628 | HCG9 | 2.78E−05 | C | 0.47 | 0.54 | 1.26 | 1.13 | 1.39 |
| 6 | rs2517689 | 30,037,232 | HCG9 | 3.15E−05 | A | 0.47 | 0.54 | 1.25 | 1.13 | 1.39 |
| 6 | rs3095340 | 30,834,918 | IER3 | 9.12E−06 | C | 0.15 | 0.09 | 0.66 | 0.56 | 0.78 |
| 6 | rs3094122 | 30,836,339 | IER3 | 1.95E−06 | C | 0.22 | 0.16 | 0.71 | 0.62 | 0.81 |
| 6 | rs6911628 | 30,847,825 | IER3 | 2.80E−07 | A | 0.27 | 0.19 | 0.71 | 0.63 | 0.81 |
| 6 | rs3131043 | 30,866,445 | IER3 | 5.10E−06 | G | 0.44 | 0.38 | 0.77 | 0.69 | 0.86 |
| 6 | rs886424 | 30,889,981 | IER3 | 9.73E−06 | A | 0.12 | 0.07 | 0.61 | 0.50 | 0.74 |
| 6 | rs2844659 | 30,932,511 | DDR1 | 1.03E−04 | A | 0.19 | 0.13 | 0.74 | 0.64 | 0.85 |
| 6 | rs2240804 | 31,028,869 | DPCR1 | 1.04E−04 | A | 0.35 | 0.41 | 1.24 | 1.11 | 1.37 |
| 6 | rs3095089 | 31,041,773 | DPCR1 | 5.03E−07 | A | 0.17 | 0.11 | 0.66 | 0.56 | 0.77 |
| 6 | rs3130544 | 31,166,319 | C6orf15 | 7.44E−05 | A | 0.11 | 0.06 | 0.64 | 0.52 | 0.78 |
| 6 | rs2233956 | 31,189,184 | C6orf15 | 2.00E−06 | G | 0.18 | 0.11 | 0.65 | 0.56 | 0.77 |
| 6 | rs7750641 | 31,237,289 | TCF19 | 7.52E−05 | A | 0.11 | 0.06 | 0.64 | 0.52 | 0.78 |
| 6 | rs2442749 | 31,460,019 | MICA | 1.19E−07 | G | 0.28 | 0.22 | 0.71 | 0.63 | 0.80 |
| 6 | rs3749946 | 31,556,841 | HCP5 | 1.68E−05 | A | 0.08 | 0.06 | 0.64 | 0.52 | 0.78 |
| 6 | rs3099844 | 31,556,955 | HCP5 | 8.60E−05 | A | 0.12 | 0.07 | 0.65 | 0.54 | 0.79 |
| 6 | rs2516399 | 31,589,278 | MICB | 6.79E−05 | G | 0.10 | 0.14 | 1.38 | 1.18 | 1.60 |
| 6 | rs2246986 | 31,590,182 | MICB | 1.89E−05 | G | 0.10 | 0.13 | 1.41 | 1.21 | 1.65 |
| 6 | rs2239705 | 31,621,381 | ATP6V1G2 | 3.32E−05 | A | 0.18 | 0.23 | 1.31 | 1.16 | 1.48 |
| 6 | rs2260000 | 31,701,455 | BAT2 | 3.82E−06 | G | 0.38 | 0.45 | 1.28 | 1.16 | 1.42 |
| 6 | rs1046089 | 31,710,946 | BAT2 | 5.92E−05 | A | 0.33 | 0.27 | 0.79 | 0.70 | 0.88 |
| 6 | rs9267522 | 31,711,749 | BAT2 | 8.88E−05 | G | 0.18 | 0.13 | 0.73 | 0.63 | 0.85 |
| 6 | rs1077393 | 31,718,508 | BAT3 | 5.89E−08 | A | 0.51 | 0.42 | 0.75 | 0.67 | 0.83 |
| 6 | rs805303 | 31,724,345 | BAT3 | 1.91E−07 | A | 0.36 | 0.29 | 0.74 | 0.66 | 0.82 |
| 6 | rs3117582 | 31,728,499 | BAT3 | 5.20E−07 | C | 0.10 | 0.05 | 0.54 | 0.43 | 0.67 |
| 6 | rs1266071 | 31,777,475 | BAT5 | 1.90E−05 | A | 0.10 | 0.14 | 1.40 | 1.20 | 1.62 |
| 6 | rs805294 | 31,796,196 | LY6G6C | 3.67E−07 | G | 0.35 | 0.28 | 0.74 | 0.66 | 0.83 |
| 6 | rs3131379 | 31,829,012 | MSH5 | 9.16E−07 | A | 0.10 | 0.05 | 0.54 | 0.43 | 0.68 |
| 6 | rs707939 | 31,834,667 | MSH5 | 9.26E−06 | A | 0.36 | 0.43 | 1.27 | 1.15 | 1.42 |
| 6 | rs707928 | 31,850,569 | C6orf27 | 1.42E−11 | G | 0.33 | 0.23 | 0.66 | 0.59 | 0.74 |
| 6 | rs2075800 | 31,885,925 | HSPA1L | 2.57E−06 | A | 0.34 | 0.42 | 1.29 | 1.17 | 1.44 |
| 6 | rs660550 | 31,945,256 | SLC44A4 | 1.16E−05 | C | 0.43 | 0.35 | 0.78 | 0.70 | 0.87 |
| 6 | rs644827 | 31,946,420 | SLC44A4 | 1.60E−05 | A | 0.43 | 0.35 | 0.78 | 0.70 | 0.87 |
| 6 | rs494620 | 31,946,692 | SLC44A4 | 3.72E−07 | A | 0.43 | 0.52 | 1.32 | 1.19 | 1.46 |
| 6 | rs2242665 | 31,947,288 | SLC44A4 | 1.36E−05 | G | 0.43 | 0.35 | 0.78 | 0.70 | 0.87 |
| 6 | rs652888 | 31,959,213 | EHMT2 | 2.58E−08 | G | 0.20 | 0.13 | 0.64 | 0.55 | 0.74 |
| 6 | rs659445 | 31,972,283 | EHMT2 | 2.78E−05 | G | 0.32 | 0.25 | 0.77 | 0.68 | 0.86 |
| 6 | rs558702 | 31,978,305 | ZBTB12 | 7.36E−07 | A | 0.10 | 0.05 | 0.54 | 0.43 | 0.67 |
| 6 | rs4151657 | 32,025,519 | BF | 3.21E−08 | G | 0.36 | 0.44 | 1.35 | 1.22 | 1.50 |
| 6 | rs1270942 | 32,026,839 | BF | 4.49E−07 | G | 0.10 | 0.05 | 0.53 | 0.43 | 0.67 |
| 6 | rs2072633 | 32,027,557 | BF | 3.60E−10 | A | 0.42 | 0.33 | 0.70 | 0.63 | 0.78 |
| 6 | rs437179 | 32,036,993 | SKIV2L | 8.48E−08 | A | 0.29 | 0.21 | 0.71 | 0.63 | 0.80 |
| 6 | rs389884 | 32,048,876 | STK19 | 4.97E−07 | G | 0.10 | 0.05 | 0.54 | 0.43 | 0.67 |
| 6 | rs6941112 | 32,054,593 | STK19 | 7.50E−11 | A | 0.33 | 0.42 | 1.43 | 1.29 | 1.59 |
| 6 | rs389883 | 32,055,439 | STK19 | 9.05E−08 | C | 0.29 | 0.21 | 0.71 | 0.63 | 0.80 |
| 6 | rs185819 | 32,158,045 | TNXB | 9.76E−07 | A | 0.49 | 0.41 | 0.77 | 0.69 | 0.85 |
| 6 | rs2269426 | 32,184,477 | TNXB | 7.08E−10 | A | 0.40 | 0.50 | 1.39 | 1.25 | 1.54 |
| 6 | rs8111 | 32,191,153 | CREBL1 | 2.01E−08 | A | 0.29 | 0.38 | 1.37 | 1.23 | 1.53 |
| 6 | rs1035798 | 32,259,200 | AGER | 5.57E−05 | A | 0.26 | 0.32 | 1.26 | 1.13 | 1.41 |
| 6 | rs2070600 | 32,259,421 | AGER | 1.15E−10 | A | 0.04 | 0.08 | 1.98 | 1.61 | 2.44 |
| 6 | rs9267833 | 32,285,878 | NOTCH4 | 3.35E−05 | G | 0.28 | 0.34 | 1.26 | 1.14 | 1.41 |
| 6 | rs2071286 | 32,287,874 | NOTCH4 | 1.47E−05 | A | 0.23 | 0.29 | 1.30 | 1.16 | 1.45 |
| 6 | rs206015 | 32,290,737 | NOTCH4 | 9.66E−05 | A | 0.11 | 0.14 | 1.35 | 1.16 | 1.56 |
| 6 | rs377763 | 32,307,122 | NOTCH4 | 1.03E−08 | A | 0.21 | 0.14 | 0.65 | 0.57 | 0.75 |
| 6 | rs3130299 | 32,311,515 | NOTCH4 | 9.19E−05 | G | 0.27 | 0.33 | 1.25 | 1.12 | 1.39 |
| 6 | rs412657 | 32,319,063 | LOC401252 | 6.99E−06 | C | 0.44 | 0.39 | 0.78 | 0.70 | 0.87 |
| 6 | rs9267947 | 32,319,196 | LOC401252 | 2.08E−09 | G | 0.45 | 0.36 | 0.72 | 0.65 | 0.80 |
| 6 | rs17576984 | 32,320,963 | LOC401252 | 1.49E−05 | A | 0.09 | 0.06 | 0.63 | 0.51 | 0.77 |
| 6 | rs405875 | 32,323,166 | LOC401252 | 3.94E−11 | G | 0.44 | 0.55 | 1.43 | 1.29 | 1.59 |
| 6 | rs3115573 | 32,326,821 | LOC401252 | 2.63E−11 | G | 0.44 | 0.54 | 1.44 | 1.29 | 1.59 |
| 6 | rs3130315 | 32,328,663 | LOC401252 | 2.71E−11 | A | 0.44 | 0.54 | 1.43 | 1.29 | 1.59 |
| 6 | rs3130320 | 32,331,236 | LOC401252 | 5.64E−19 | A | 0.36 | 0.23 | 0.57 | 0.51 | 0.64 |
| 6 | rs3130340 | 32,352,605 | LOC401252 | 1.42E−16 | G | 0.22 | 0.11 | 0.51 | 0.44 | 0.59 |
| 6 | rs3115553 | 32,353,805 | LOC401252 | 1.49E−16 | A | 0.22 | 0.11 | 0.51 | 0.44 | 0.59 |
| 6 | rs9268132 | 32,362,632 | C6orf10 | 1.58E−15 | G | 0.40 | 0.52 | 1.54 | 1.39 | 1.70 |
| 6 | rs6935269 | 32,368,328 | C6orf10 | 1.45E−16 | G | 0.22 | 0.11 | 0.51 | 0.44 | 0.59 |
| 6 | rs7775397 | 32,369,230 | C6orf10 | 5.91E−08 | C | 0.10 | 0.05 | 0.50 | 0.40 | 0.63 |
| 6 | rs6457536 | 32,381,743 | C6orf10 | 8.44E−16 | G | 0.21 | 0.11 | 0.51 | 0.44 | 0.60 |
| 6 | rs547261 | 32,390,011 | C6orf10 | 1.73E−15 | A | 0.40 | 0.52 | 1.53 | 1.38 | 1.70 |
| 6 | rs6910071 | 32,390,832 | C6orf10 | 2.95E−13 | G | 0.18 | 0.26 | 1.58 | 1.40 | 1.78 |
| 6 | rs547077 | 32,397,296 | C6orf10 | 7.25E−15 | G | 0.40 | 0.52 | 1.52 | 1.37 | 1.69 |
| 6 | rs570963 | 32,397,572 | C6orf10 | 3.03E−05 | G | 0.11 | 0.08 | 0.67 | 0.56 | 0.81 |
| 6 | rs9368713 | 32,405,315 | C6orf10 | 4.92E−15 | G | 0.40 | 0.52 | 1.53 | 1.38 | 1.69 |
| 6 | rs9405090 | 32,406,350 | C6orf10 | 3.32E−15 | G | 0.40 | 0.52 | 1.53 | 1.38 | 1.70 |
| 6 | rs1003878 | 32,407,800 | C6orf10 | 1.90E−10 | A | 0.22 | 0.13 | 0.61 | 0.53 | 0.71 |
| 6 | rs1033500 | 32,415,360 | C6orf10 | 4.63E−15 | A | 0.40 | 0.52 | 1.53 | 1.38 | 1.69 |
| 6 | rs2076537 | 32,425,613 | C6orf10 | 2.81E−11 | A | 0.36 | 0.26 | 0.67 | 0.60 | 0.75 |
| 6 | rs9268368 | 32,441,933 | C6orf10 | 3.16E−15 | G | 0.40 | 0.52 | 1.53 | 1.38 | 1.70 |
| 6 | rs9268384 | 32,444,564 | C6orf10 | 3.41E−15 | G | 0.40 | 0.52 | 1.53 | 1.38 | 1.70 |
| 6 | rs3129939 | 32,444,744 | C6orf10 | 3.35E−11 | G | 0.17 | 0.09 | 0.53 | 0.45 | 0.64 |
| 6 | rs3129943 | 32,446,673 | C6orf10 | 1.06E−13 | G | 0.24 | 0.15 | 0.58 | 0.50 | 0.66 |
| 6 | rs4424066 | 32,462,406 | BTNL2 | 4.84E−12 | G | 0.42 | 0.51 | 1.44 | 1.30 | 1.59 |
| 6 | rs3117099 | 32,466,248 | BTNL2 | 2.11E−26 | A | 0.21 | 0.09 | 0.41 | 0.35 | 0.48 |
| 6 | rs3817973 | 32,469,089 | BTNL2 | 3.43E−12 | A | 0.42 | 0.51 | 1.44 | 1.30 | 1.59 |
| 6 | rs1980493 | 32,471,193 | BTNL2 | 8.63E−16 | G | 0.15 | 0.06 | 0.43 | 0.36 | 0.53 |
| 6 | rs2076530 | 32,471,794 | BTNL2 | 1.08E−10 | G | 0.42 | 0.51 | 1.40 | 1.27 | 1.55 |
| 6 | rs10947262 | 32,481,290 | BTNL2 | 6.01E−11 | A | 0.08 | 0.04 | 0.45 | 0.35 | 0.57 |
| 6 | rs3763309 | 32,483,951 | BTNL2 | 1.60E−15 | A | 0.20 | 0.30 | 1.60 | 1.43 | 1.79 |
| 6 | rs3763312 | 32,484,326 | BTNL2 | 2.53E−16 | A | 0.20 | 0.30 | 1.62 | 1.44 | 1.82 |
| 6 | rs3129963 | 32,488,186 | BTNL2 | 2.16E−19 | G | 0.17 | 0.07 | 0.42 | 0.35 | 0.50 |
| 6 | rs6932542 | 32,488,240 | BTNL2 | 2.34E−06 | A | 0.49 | 0.42 | 0.78 | 0.70 | 0.86 |
| 6 | rs9268528 | 32,491,086 | BTNL2 | 1.25E−21 | G | 0.37 | 0.51 | 1.68 | 1.51 | 1.87 |
| 6 | rs9268530 | 32,491,201 | BTNL2 | 9.00E−19 | G | 0.16 | 0.07 | 0.41 | 0.34 | 0.50 |
| 6 | rs9268542 | 32,492,699 | BTNL2 | 2.67E−20 | G | 0.38 | 0.51 | 1.65 | 1.49 | 1.83 |
| 6 | rs2395162 | 32,495,758 | BTNL2 | 4.55E−19 | A | 0.16 | 0.07 | 0.41 | 0.34 | 0.50 |
| 6 | rs2395163 | 32,495,787 | BTNL2 | 1.51E−11 | G | 0.20 | 0.28 | 1.50 | 1.34 | 1.69 |
| 6 | rs3135353 | 32,500,855 | HLA-DRA | 6.49E−15 | A | 0.14 | 0.06 | 0.43 | 0.35 | 0.52 |
| 6 | rs9268615 | 32,510,867 | HLA-DRA | 1.22E−25 | A | 0.39 | 0.54 | 1.75 | 1.58 | 1.94 |
| 6 | rs2395173 | 32,512,837 | HLA-DRA | 1.04E−05 | A | 0.34 | 0.29 | 0.78 | 0.70 | 0.87 |
| 6 | rs2395174 | 32,512,856 | HLA-DRA | 1.11E−11 | C | 0.28 | 0.18 | 0.63 | 0.56 | 0.72 |
| 6 | rs2395175 | 32,513,004 | HLA-DRA | 2.25E−12 | A | 0.14 | 0.21 | 1.61 | 1.41 | 1.84 |
| 6 | rs3129871 | 32,514,320 | HLA-DRA | 2.02E−08 | A | 0.36 | 0.29 | 0.73 | 0.66 | 0.81 |
| 6 | rs2239804 | 32,519,501 | HLA-DRA | 5.03E−28 | A | 0.54 | 0.38 | 0.55 | 0.49 | 0.61 |
| 6 | rs7192 | 32,519,624 | HLA-DRA | 2.93E−31 | A | 0.39 | 0.23 | 0.49 | 0.44 | 0.56 |
| 6 | rs2395182 | 32,521,295 | HLA-DRA | 5.56E−08 | C | 0.22 | 0.17 | 0.69 | 0.61 | 0.79 |
| 6 | rs3129890 | 32,522,251 | HLA-DRA | 7.00E−19 | G | 0.26 | 0.15 | 0.53 | 0.46 | 0.61 |
| 6 | rs9268832 | 32,535,767 | HLA-DRA | 9.03E−23 | A | 0.40 | 0.27 | 0.56 | 0.50 | 0.63 |
| 6 | rs2187668 | 32,713,862 | HLA-DQA1 | 4.01E−08 | A | 0.11 | 0.06 | 0.54 | 0.44 | 0.66 |
| 6 | rs1063355 | 32,735,692 | HLA-DQA1 | 2.46E−11 | A | 0.42 | 0.34 | 0.69 | 0.62 | 0.77 |
| 6 | rs9275224 | 32,767,856 | HLA-DQA1 | 3.60E−17 | A | 0.49 | 0.37 | 0.63 | 0.57 | 0.70 |
| 6 | rs6457617 | 32,771,829 | HLA-DQA2 | 8.75E−18 | G | 0.50 | 0.37 | 0.62 | 0.56 | 0.69 |
| 6 | rs2647012 | 32,772,436 | HLA-DQA2 | 1.69E−29 | A | 0.39 | 0.23 | 0.50 | 0.45 | 0.56 |
| 6 | rs9357152 | 32,772,938 | HLA-DQA2 | 4.65E−26 | G | 0.26 | 0.39 | 1.81 | 1.62 | 2.01 |
| 6 | rs1794282 | 32,774,504 | HLA-DQA2 | 5.99E−08 | A | 0.10 | 0.04 | 0.50 | 0.40 | 0.63 |
| 6 | rs2856725 | 32,774,716 | HLA-DQA2 | 7.28E−30 | G | 0.39 | 0.23 | 0.50 | 0.44 | 0.56 |
| 6 | rs11752643 | 32,777,351 | HLA-DQA2 | 6.52E−10 | A | 0.03 | 0.01 | 0.18 | 0.10 | 0.33 |
| 6 | rs2647050 | 32,777,745 | HLA-DQA2 | 6.94E−32 | G | 0.37 | 0.53 | 1.87 | 1.69 | 2.07 |
| 6 | rs2856718 | 32,778,233 | HLA-DQA2 | 7.36E−32 | A | 0.37 | 0.53 | 1.87 | 1.69 | 2.07 |
| 6 | rs2856717 | 32,778,286 | HLA-DQA2 | 1.47E−28 | A | 0.38 | 0.23 | 0.51 | 0.45 | 0.57 |
| 6 | rs2858305 | 32,778,442 | HLA-DQA2 | 1.67E−28 | C | 0.39 | 0.23 | 0.51 | 0.45 | 0.57 |
| 6 | rs16898264 | 32,785,130 | HLA-DQA2 | 1.66E−32 | A | 0.37 | 0.53 | 1.88 | 1.70 | 2.09 |
| 6 | rs9275572 | 32,786,977 | HLA-DQA2 | 1.38E−35 | A | 0.41 | 0.24 | 0.47 | 0.42 | 0.53 |
| 6 | rs7745656 | 32,788,948 | HLA-DQA2 | 6.71E−17 | A | 0.29 | 0.40 | 1.59 | 1.43 | 1.77 |
| 6 | rs2858332 | 32,789,139 | HLA-DQA2 | 2.46E−16 | C | 0.49 | 0.37 | 0.64 | 0.57 | 0.71 |
| 6 | rs2858331 | 32,789,255 | HLA-DQA2 | 2.70E−14 | G | 0.41 | 0.52 | 1.51 | 1.36 | 1.67 |
| 6 | rs3104404 | 32,790,152 | HLA-DQA2 | 5.54E−08 | A | 0.20 | 0.27 | 1.40 | 1.24 | 1.58 |
| 6 | rs3104405 | 32,790,286 | HLA-DQA2 | 2.51E−08 | C | 0.32 | 0.26 | 0.72 | 0.64 | 0.81 |
| 6 | rs12177980 | 32,794,062 | HLA-DQA2 | 5.05E−14 | A | 0.41 | 0.52 | 1.49 | 1.35 | 1.65 |
| 6 | rs9275659 | 32,794,081 | HLA-DQA2 | 2.63E−11 | A | 0.20 | 0.12 | 0.59 | 0.51 | 0.69 |
| 6 | rs9275686 | 32,795,548 | HLA-DQA2 | 1.96E−11 | A | 0.20 | 0.12 | 0.59 | 0.51 | 0.69 |
| 6 | rs9275698 | 32,795,951 | HLA-DQA2 | 8.70E−08 | G | 0.35 | 0.27 | 0.73 | 0.65 | 0.81 |
| 6 | rs9461799 | 32,797,507 | HLA-DQA2 | 6.01E−14 | G | 0.41 | 0.52 | 1.49 | 1.35 | 1.65 |
| 6 | rs2859078 | 32,810,427 | HLA-DQA2 | 9.09E−12 | G | 0.21 | 0.13 | 0.59 | 0.51 | 0.69 |
| 6 | rs13199787 | 32,813,254 | HLA-DQA2 | 8.76E−13 | A | 0.42 | 0.52 | 1.46 | 1.32 | 1.62 |
| 6 | rs17500468 | 32,819,156 | HLA-DQA2 | 1.18E−07 | G | 0.13 | 0.18 | 1.45 | 1.27 | 1.67 |
| 6 | rs9276435 | 32,821,845 | HLA-DQA2 | 1.85E−08 | A | 0.17 | 0.10 | 0.62 | 0.53 | 0.72 |
| 6 | rs2071800 | 32,822,121 | HLA-DQA2 | 1.06E−09 | A | 0.07 | 0.11 | 1.71 | 1.44 | 2.03 |
| 6 | rs10807113 | 32,830,164 | HLA-DQB2 | 8.02E−10 | C | 0.50 | 0.41 | 0.72 | 0.65 | 0.80 |
| 6 | rs7756516 | 32,831,895 | HLA-DQB2 | 6.59E−10 | G | 0.50 | 0.41 | 0.72 | 0.65 | 0.79 |
| 6 | rs2301271 | 32,833,171 | HLA-DQB2 | 1.04E−11 | A | 0.42 | 0.32 | 0.68 | 0.61 | 0.76 |
| 6 | rs7453920 | 32,837,990 | HLA-DQB2 | 1.79E−11 | A | 0.42 | 0.32 | 0.69 | 0.62 | 0.76 |
| 6 | rs2051549 | 32,838,064 | HLA-DQB2 | 6.30E−13 | G | 0.42 | 0.31 | 0.66 | 0.60 | 0.74 |
| 6 | rs2071550 | 32,838,918 | HLA-DQB2 | 6.73E−05 | A | 0.32 | 0.38 | 1.25 | 1.12 | 1.38 |
| 6 | rs6903130 | 32,840,188 | HLA-DQB2 | 1.73E−13 | G | 0.50 | 0.39 | 0.68 | 0.61 | 0.75 |
| 6 | rs6901084 | 32,844,914 | HLA-DQB2 | 3.27E−10 | A | 0.44 | 0.54 | 1.40 | 1.26 | 1.55 |
| 6 | rs9368741 | 32,845,485 | HLA-DQB2 | 7.15E−05 | A | 0.32 | 0.38 | 1.25 | 1.12 | 1.38 |
| 6 | rs9276644 | 32,853,021 | HLA-DQB2 | 1.60E−05 | G | 0.34 | 0.39 | 1.26 | 1.14 | 1.39 |
| 6 | rs7758736 | 32,866,372 | HLA-DOB | 2.07E−08 | A | 0.17 | 0.10 | 0.62 | 0.53 | 0.73 |
| 6 | rs3948793 | 32,867,426 | HLA-DOB | 8.17E−05 | A | 0.35 | 0.39 | 1.23 | 1.11 | 1.37 |
| 6 | rs17429444 | 32,894,046 | HLA-DOB | 3.93E−07 | G | 0.11 | 0.16 | 1.46 | 1.26 | 1.69 |
| 6 | rs3819721 | 32,912,776 | TAP2 | 6.42E−06 | A | 0.23 | 0.29 | 1.30 | 1.16 | 1.46 |
| 6 | rs1480380 | 33,021,224 | HLA-DMA | 4.66E−05 | A | 0.08 | 0.04 | 0.60 | 0.47 | 0.75 |
| 6 | rs1476387 | 109,871,228 | SMPD2 | 5.11E−05 | A | 0.42 | 0.48 | 1.23 | 1.12 | 1.36 |
| 6 | rs2025148 | 110,134,636 | KIAA0274 | 7.38E−05 | A | 0.39 | 0.44 | 1.23 | 1.11 | 1.36 |
| 6 | rs2343266 | 150,371,754 | RAET1L | 3.14E−05 | G | 0.19 | 0.23 | 1.29 | 1.15 | 1.46 |
| 6 | rs12209388 | 150,390,825 | RAET1L | 9.85E−07 | G | 0.20 | 0.25 | 1.34 | 1.20 | 1.51 |
| 6 | rs12183587 | 150,396,301 | RAET1L | 2.01E−18 | C | 0.43 | 0.32 | 0.62 | 0.56 | 0.69 |
| 6 | rs1413901 | 150,397,134 | RAET1L | 2.76E−08 | G | 0.12 | 0.17 | 1.50 | 1.30 | 1.72 |
| 6 | rs6935051 | 150,398,646 | RAET1L | 2.92E−08 | G | 0.38 | 0.45 | 1.33 | 1.21 | 1.47 |
| 6 | rs9479482 | 150,399,705 | RAET1L | 4.49E−19 | G | 0.43 | 0.32 | 0.62 | 0.55 | 0.68 |
| 6 | rs644866 | 150,405,702 | RAET1L | 8.29E−06 | G | 0.18 | 0.23 | 1.32 | 1.17 | 1.49 |
| 6 | rs11155700 | 150,409,957 | ULBP3 | 7.10E−09 | G | 0.26 | 0.33 | 1.38 | 1.24 | 1.53 |
| 6 | rs12213837 | 150,410,656 | ULBP3 | 9.18E−09 | A | 0.26 | 0.33 | 1.38 | 1.24 | 1.53 |
| 6 | rs13729 | 150,424,186 | ULBP3 | 2.63E−10 | G | 0.27 | 0.35 | 1.41 | 1.27 | 1.57 |
| 6 | rs2010259 | 150,427,168 | ULBP3 | 2.04E−12 | A | 0.37 | 0.28 | 0.67 | 0.60 | 0.75 |
| 6 | rs12202737 | 150,429,439 | ULBP3 | 5.12E−10 | A | 0.28 | 0.35 | 1.41 | 1.27 | 1.57 |
| 6 | rs2009345 | 150,431,441 | ULBP3 | 4.43E−17 | G | 0.39 | 0.50 | 1.55 | 1.40 | 1.72 |
| 6 | rs470138 | 150,443,878 | ULBP3 | 2.19E−07 | C | 0.40 | 0.34 | 0.76 | 0.68 | 0.84 |
| 6 | rs9397624 | 150,447,389 | ULBP3 | 3.28E−07 | A | 0.40 | 0.34 | 0.76 | 0.69 | 0.84 |
| 6 | rs11759611 | 150,453,135 | ULBP3 | 2.05E−09 | C | 0.36 | 0.29 | 0.71 | 0.64 | 0.80 |
| 6 | rs9458348 | 162,069,529 | PARK2 | 8.79E−05 | G | 0.27 | 0.32 | 1.25 | 1.12 | 1.39 |
| 7 | rs847440 | 16,984,957 | BCMP11 | 5.37E−05 | A | 0.44 | 0.50 | 1.23 | 1.12 | 1.36 |
| 7 | rs4722166 | 22,705,287 | IL6 | 7.98E−05 | C | 0.34 | 0.39 | 1.24 | 1.12 | 1.38 |
| 7 | rs7776857 | 22,721,293 | IL6 | 7.72E−05 | C | 0.32 | 0.37 | 1.24 | 1.12 | 1.38 |
| 7 | rs10488223 | 132,436,737 | CHCHD3 | 3.07E−05 | G | 0.06 | 0.03 | 0.56 | 0.43 | 0.73 |
| 8 | rs10104470 | 3,022,070 | CSMD1 | 8.65E−05 | C | 0.43 | 0.49 | 1.23 | 1.11 | 1.35 |
| 8 | rs13257028 | 68,746,276 | CPA6 | 9.50E−05 | G | 0.35 | 0.39 | 1.24 | 1.11 | 1.37 |
| 8 | rs2553650 | 68,775,254 | CPA6 | 2.02E−05 | G | 0.27 | 0.31 | 1.28 | 1.15 | 1.43 |
| 9 | rs1997368 | 101,753,401 | STX17 | 5.44E−07 | G | 0.31 | 0.38 | 1.32 | 1.18 | 1.46 |
| 9 | rs10760706 | 101,763,513 | STX17 | 3.60E−07 | G | 0.31 | 0.38 | 1.32 | 1.19 | 1.47 |
| 9 | rs16918878 | 101,886,451 | TXNDC4 | 2.35E−05 | A | 0.27 | 0.33 | 1.27 | 1.14 | 1.41 |
| 10 | rs942201 | 6,126,298 | IL2RA | 5.89E−07 | A | 0.21 | 0.26 | 1.35 | 1.20 | 1.52 |
| 10 | rs1107345 | 6,127,301 | IL2RA | 4.48E−07 | A | 0.21 | 0.26 | 1.36 | 1.21 | 1.52 |
| 10 | rs706779 | 6,138,830 | IL2RA | 4.84E−08 | G | 0.49 | 0.42 | 0.75 | 0.68 | 0.83 |
| 10 | rs3118470 | 6,141,719 | IL2RA | 1.74E−12 | G | 0.30 | 0.38 | 1.48 | 1.33 | 1.65 |
| 10 | rs7072793 | 6,146,272 | IL2RA | 7.42E−07 | G | 0.40 | 0.46 | 1.30 | 1.18 | 1.44 |
| 10 | rs7073236 | 6,146,558 | IL2RA | 1.41E−06 | G | 0.40 | 0.46 | 1.29 | 1.17 | 1.43 |
| 10 | rs4147359 | 6,148,445 | IL2RA | 2.22E−08 | A | 0.33 | 0.39 | 1.36 | 1.23 | 1.51 |
| 10 | rs7090530 | 6,150,881 | IL2RA | 6.29E−05 | C | 0.42 | 0.38 | 0.81 | 0.73 | 0.89 |
| 10 | rs10905879 | 6,217,089 | RBM17 | 2.70E−06 | A | 0.17 | 0.22 | 1.35 | 1.20 | 1.53 |
| 10 | rs631902 | 6,269,580 | PFKFB3 | 8.59E−05 | A | 0.37 | 0.42 | 1.23 | 1.11 | 1.36 |
| 11 | rs694739 | 63,853,809 | PRDX5 | 4.14E−07 | G | 0.37 | 0.31 | 0.75 | 0.68 | 0.84 |
| 11 | rs538147 | 63,886,298 | RPS6KA4 | 2.96E−06 | A | 0.37 | 0.31 | 0.77 | 0.69 | 0.86 |
| 11 | rs645078 | 63,891,874 | RPS6KA4 | 2.38E−06 | C | 0.37 | 0.31 | 0.77 | 0.69 | 0.85 |
| 12 | rs2069408 | 54,650,588 | CDK2 | 1.75E−07 | G | 0.32 | 0.38 | 1.32 | 1.19 | 1.47 |
| 12 | rs11171710 | 54,654,345 | RAB5B | 3.06E−05 | A | 0.45 | 0.40 | 0.80 | 0.73 | 0.89 |
| 12 | rs773107 | 54,655,773 | RAB5B | 9.29E−08 | G | 0.32 | 0.39 | 1.33 | 1.20 | 1.47 |
| 12 | rs10876864 | 54,687,352 | SUOX | 8.41E−08 | G | 0.41 | 0.47 | 1.32 | 1.20 | 1.46 |
| 12 | rs1701704 | 54,698,754 | ZNFN1A4 | 3.21E−08 | C | 0.33 | 0.40 | 1.34 | 1.21 | 1.48 |
| 12 | rs705708 | 54,775,180 | ERBB3 | 1.27E−07 | A | 0.47 | 0.53 | 1.32 | 1.19 | 1.46 |
| 12 | rs10783779 | 54,778,147 | ERBB3 | 6.10E−07 | C | 0.41 | 0.47 | 1.30 | 1.18 | 1.44 |
| 12 | rs2069718 | 66,836,429 | IFNG | 1.55E−05 | A | 0.41 | 0.35 | 0.79 | 0.71 | 0.88 |
| 12 | rs4913277 | 66,868,439 | IL26 | 9.85E−05 | G | 0.39 | 0.33 | 0.81 | 0.73 | 0.90 |
| 12 | rs2870951 | 66,870,812 | IL26 | 7.18E−05 | A | 0.40 | 0.35 | 0.80 | 0.73 | 0.89 |
| 12 | rs2454722 | 121,737,171 | GPR109A | 6.87E−05 | G | 0.18 | 0.22 | 1.29 | 1.14 | 1.45 |
| 13 | rs9568142 | 48,467,070 | FNDC3A | 1.05E−04 | C | 0.04 | 0.06 | 1.58 | 1.26 | 1.98 |
| 13 | rs3895825 | 79,494,436 | SPRY2 | 1.00E−04 | C | 0.20 | 0.24 | 1.28 | 1.13 | 1.44 |
| 13 | rs7323548 | 112,320,879 | FLJ26443 | 2.52E−05 | A | 0.05 | 0.07 | 1.56 | 1.27 | 1.91 |
| 16 | rs17229044 | 10,970,437 | KIAA0350 | 9.98E−05 | A | 0.21 | 0.17 | 0.77 | 0.68 | 0.88 |
| 16 | rs12934193 | 11,011,226 | KIAA0350 | 2.75E−05 | G | 0.18 | 0.14 | 0.74 | 0.64 | 0.85 |
| 16 | rs12599402 | 11,097,389 | KIAA0350 | 1.03E−04 | G | 0.43 | 0.39 | 0.82 | 0.74 | 0.90 |
| 16 | rs998592 | 11,107,179 | KIAA0350 | 1.77E−05 | A | 0.43 | 0.37 | 0.80 | 0.72 | 0.88 |
| 16 | rs9933507 | 11,108,929 | KIAA0350 | 2.61E−05 | G | 0.43 | 0.38 | 0.80 | 0.73 | 0.89 |
| 16 | rs12103174 | 11,111,231 | KIAA0350 | 2.73E−05 | G | 0.43 | 0.38 | 0.80 | 0.73 | 0.89 |
| 16 | rs8060821 | 11,241,560 | SOCS1 | 1.16E−05 | C | 0.43 | 0.37 | 0.79 | 0.71 | 0.87 |
| 16 | rs408665 | 11,249,473 | SOCS1 | 2.30E−05 | A | 0.44 | 0.39 | 0.80 | 0.72 | 0.88 |
| 16 | rs243323 | 11,268,703 | TNP2 | 9.53E−05 | G | 0.32 | 0.28 | 0.80 | 0.71 | 0.89 |
| 16 | rs4451969 | 11,291,020 | PRM1 | 1.39E−05 | A | 0.36 | 0.30 | 0.78 | 0.70 | 0.87 |
| 16 | rs7203055 | 11,381,157 | MGC24665 | 5.79E−05 | G | 0.37 | 0.32 | 0.80 | 0.72 | 0.89 |
| 16 | rs7500151 | 84,115,480 | KIAA0182 | 7.50E−05 | A | 0.36 | 0.31 | 0.80 | 0.72 | 0.89 |
| 18 | rs9945360 | 9,138,164 | ANKRD12 | 5.47E−05 | A | 0.39 | 0.33 | 0.80 | 0.72 | 0.89 |
| 18 | rs4798791 | 9,245,982 | ANKRD12 | 3.59E−05 | A | 0.39 | 0.33 | 0.80 | 0.72 | 0.89 |
| 18 | rs1893217 | 12,799,340 | PTPN2 | 4.09E−06 | G | 0.16 | 0.20 | 1.36 | 1.20 | 1.55 |
| 19 | rs8106303 | 40,349,191 | FXYD5 | 1.06E−04 | A | 0.22 | 0.19 | 0.78 | 0.68 | 0.88 |
| 19 | rs12110 | 40,352,348 | FXYD5 | 9.16E−05 | G | 0.22 | 0.19 | 0.77 | 0.68 | 0.88 |
| 20 | rs2247082 | 1,601,863 | SIRPB2 | 9.29E−05 | A | 0.23 | 0.26 | 1.27 | 1.13 | 1.42 |
| 20 | rs2377318 | 29,916,695 | DUSP15 | 4.47E−05 | A | 0.29 | 0.34 | 1.25 | 1.13 | 1.40 |
| 21 | rs2825523 | 19,627,751 | PRSS7 | 1.81E−05 | A | 0.39 | 0.45 | 1.25 | 1.13 | 1.39 |

TABLE 3
Haplotype organization of SNPs that exceed genome-wide significance.

| | | | | | Risk Allele | | | | |
|---|---|---|---|---|---|---|---|---|---|
| | | Risk | | | Frequency | | Allelic χ² | | |
| Chr | Locus | Haplotype | Marker | Mb | Controls | Cases | pvalue | OR (95% CI) | GWAS |

Associations outside of the HLA

| | | | | | | | | | |
|---|---|---|---|---|---|---|---|---|---|
| 2q33 | CTLA4/ICOS | 2_1 | rs1024161 * | 204.43 | 0.40 | 0.49 | 3.55 × 10⁻¹³ | 1.44 (1.30-1.59) | |
| | | | rs926169 | 204.43 | 0.39 | 0.47 | 5.50 × 10⁻¹¹ | 1.38 (1.25-1.52) | |
| | | | rs231726 | 204.45 | 0.32 | 0.39 | 1.94 × 10⁻¹⁰ | 1.38 (1.24-1.53) | T1D¹¹ |
| | | | rs231804 | 204.42 | 0.58 | 0.65 | 4.97 × 10⁻¹⁰ | 1.38 (1.25-1.53) | |
| | | | rs231735 | 204.40 | 0.52 | 0.60 | 5.75 × 10⁻¹⁰ | 1.37 (1.24-1.52) | RA¹³ |
| | | 2_2 | rs3096851 * | 204.47 | 0.31 | 0.37 | 3.58 × 10⁻⁰⁸ | 1.32 (1.19-1.46) | |
| | | | rs3116504 | 204.48 | 0.31 | 0.37 | 3.73 × 10⁻⁰⁸ | 1.32 (1.19-1.46) | |
| | | | rs3096866 | 204.50 | 0.31 | 0.38 | 4.33 × 10⁻⁰⁸ | 1.32 (1.19-1.46) | |

Other autoimmune diseases associated with the region
Type I Diabetes, Rheumatoid Arthritis, Multiple Sclerosis, Thyroiditis,
Hashimoto diseases, Systemic Lupus Erythematosus, and Celiac Disease.

| | | | | | | | | |
|---|---|---|---|---|---|---|---|---|
| 4q26- | IL2/IL21 | 4_1 | rs7682241 * | 123.74 | 0.33 | 0.40 | 4.27 × 10⁻⁰⁸ | 1.34 (1.21-1.48) |
| q27 | | | rs2137497 | 123.78 | 0.39 | 0.46 | 5.34 × 10⁻⁰⁸ | 1.33 (1.20-1.46) |

Other autoimmune diseases associated with the region
Psoriasis, Type I Diabetes, Celiac Disease, Graves Disease, Rheumatoid Arthritis.

| | | | | | | | | |
|---|---|---|---|---|---|---|---|---|
| 6q25 | ULBP3/ULBP6 | 6_6 | rs9479482 * | 150.40 | 0.57 | 0.68 | 4.49 × 10⁻¹⁹ | 1.65 (1.48-1.83) |
| | | | rs12183587 | 150.40 | 0.57 | 0.68 | 2.01 × 10⁻¹⁸ | 1.63 (1.47-1.81) |
| | | | rs12202737 | 150.43 | 0.28 | 0.35 | 5.12 × 10⁻¹⁰ | 1.40 (1.26-1.55) |
| | | | rs11759611 | 150.45 | 0.64 | 0.71 | 2.05 × 10⁻⁰⁹ | 1.40 (1.26-1.56) |
| | | | rs12213837 | 150.41 | 0.26 | 0.33 | 9.18 × 10⁻⁰⁹ | 1.37 (1.23-1.52) |
| | | | rs470138 | 150.44 | 0.60 | 0.66 | 2.19 × 10⁻⁰⁷ | 1.31 (1.18-1.45) |
| | | 6_7 | rs2009345 * | 150.43 | 0.39 | 0.50 | 4.43 × 10⁻¹⁷ | 1.52 (1.38-1.68) |
| | | | rs2010259 | 150.43 | 0.63 | 0.72 | 2.04 × 10⁻¹² | 1.49 (1.33-1.66) |
| | | | rs13729 | 150.42 | 0.27 | 0.35 | 2.63 × 10⁻¹⁰ | 1.41 (1.27-1.56) |
| | | | rs11155700 | 150.41 | 0.26 | 0.33 | 7.10 × 10⁻⁰⁹ | 1.37 (1.23-1.53) |
| | | | rs1413901 | 150.40 | 0.12 | 0.17 | 2.76 × 10⁻⁰⁸ | 1.48 (1.29-1.70) |
| | | | rs6935051 | 150.40 | 0.38 | 0.45 | 2.92 × 10⁻⁰⁸ | 1.35 (1.22-1.49) |

Other autoimmune diseases associated with the region
none

| | | | | | | | | |
|---|---|---|---|---|---|---|---|---|
| 9q31.1 | STX17 | 9_1 | rs10760706 * | 101.76 | 0.31 | 0.38 | 3.60 × 10⁻⁷ | 1.32 (1.19-1.47) |

Other autoimmune diseases associated with the region
none

| | | | | | | | | | |
|---|---|---|---|---|---|---|---|---|---|
| 10p15- | IL2RA | 10_1 | rs4147359 * | 6.15 | 0.33 | 0.39 | 2.22 × 10⁻⁰⁸ | 1.30 (1.17-1.44) | SLE¹⁵ |
| p14 | | | rs706779 | 6.14 | 0.51 | 0.58 | 4.84 × 10⁻⁰⁸ | 1.29 (1.16-1.42) | |
| | | | rs1107345 | 6.13 | 0.21 | 0.26 | 4.48 × 10⁻⁰⁷ | 1.30 (1.16-1.46) | |
| | | 10_2 | rs3118470 * | 6.14 | 0.30 | 0.38 | 1.74 × 10⁻¹² | 1.41 (1.27-1.56) | |

Other autoimmune diseases associated with the region
Type I Diabetes, Multiple Sclerosis.

| | | | | | | | | |
|---|---|---|---|---|---|---|---|---|
| 11q13 | PRDX5 | 11_1 | rs694739 * | 63.85 | 0.63 | 0.69 | 4.14 × 10⁻⁰⁷ | 1.33 (1.19-1.48) |

Other autoimmune diseases associated with the region
Multiple Sclerosis.

| | | | | | | | | | |
|---|---|---|---|---|---|---|---|---|---|
| 12q13 | Eos (IKZF4) | 12_1 | rs1701704 * | 54.70 | 0.33 | 0.40 | 3.21 × 10⁻⁰⁸ | 1.34 (1.21-1.48) | T1D¹⁰ |
| | | | rs10876864 | 54.69 | 0.41 | 0.47 | 8.41 × 10⁻⁰⁸ | 1.32 (1.20-1.46) | |
| | | | rs773107 | 54.66 | 0.32 | 0.39 | 9.29 × 10⁻⁰⁸ | 1.33 (1.20-1.47) | |
| | | | rs2069408 | 54.65 | 0.32 | 0.38 | 1.75 × 10⁻⁰⁷ | 1.32 (1.19-1.47) | |
| | | 12_2 | rs705708 * | 54.78 | 0.47 | 0.53 | 1.27 × 10⁻⁰⁷ | 1.32 (1.19-1.46) | |

Other autoimmune diseases associated with the region
Type I Diabetes, Systemic Lupus Erythematosus.
HLA Associations

| | | | | | | | | | |
|---|---|---|---|---|---|---|---|---|---|
| 6p21.3 | HLA | 6_1 | rs9275572 * | 32.79 | 0.59 | 0.76 | 1.38 × 10⁻³⁵ | 2.21 (1.98-2.47) | MS¹¹ |
| | | | rs2647050 | 32.78 | 0.37 | 0.53 | 6.94 × 10−32 | 1.93 (1.75-2.14) | |
| | | | rs7192 | 32.52 | 0.61 | 0.77 | 2.93 × 10−31 | 2.12 (1.90-2.38) | RA^{3, 14}, |
| | | | | | | | | | SLE¹⁵ |
| | | | rs2647012 | 32.77 | 0.61 | 0.77 | 1.69 × 10−29 | 2.09 (1.87-2.34) | RA³ |
| | | | rs2856717 | 32.78 | 0.62 | 0.77 | 1.47 × 10−28 | 2.07 (1.85-2.32) | |
| | | | rs2239804 | 32.52 | 0.46 | 0.62 | 5.03 × 10−28 | 1.92 (1.74-2.12) | T1D¹⁰ |
| | | | rs3117099 | 32.47 | 0.79 | 0.91 | 2.11 × 10−26 | 2.55 (2.18-2.98) | |
| | | | rs9357152 | 32.77 | 0.26 | 0.39 | 4.65 × 10−26 | 1.84 (1.66-2.04) | CeD¹⁷, |
| | | | | | | | | | PBC¹⁸, |
| | | | | | | | | | T1D¹⁰ |
| | | | rs9268832 | 32.54 | 0.60 | 0.73 | 9.03 × 10−23 | 1.87 (1.68-2.09) | |
| | | | rs9268528 | 32.49 | 0.37 | 0.51 | 1.25 × 10−21 | 1.75 (1.59-1.93) | T1D¹⁰ |
| | | | rs9268542 | 32.49 | 0.38 | 0.51 | 2.67 × 10−20 | 1.73 (1.56-1.91) | RA¹⁴, |
| | | | | | | | | | T1D¹⁰ |
| | | | rs3129963 | 32.49 | 0.83 | 0.93 | 2.16 × 10−19 | 2.65 (2.22-3.16) | |
| | | | rs2395162 | 32.50 | 0.84 | 0.93 | 4.55 × 10−19 | 2.70 (2.25-3.23) | |
| | | | rs6457617 | 32.77 | 0.50 | 0.63 | 8.75 × 10−18 | 1.67 (1.51-1.85) | RA^{11, 12} |
| | | | rs6935269 | 32.37 | 0.78 | 0.89 | 1.45 × 10−16 | 2.15 (1.86-2.49) | |
| | | | rs6457536 | 32.38 | 0.79 | 0.89 | 8.44 × 10−16 | 2.14 (1.84-2.48) | |
| | | | rs3763309 | 32.48 | 0.20 | 0.30 | 1.60 × 10−15 | 1.67 (1.50-1.87) | |
| | | | rs547261 | 32.39 | 0.40 | 0.52 | 1.73 × 10−15 | 1.63 (1.47-1.79) | |
| | | | rs9268368 | 32.44 | 0.40 | 0.52 | 3.16 × 10−15 | 1.62 (1.46-1.78) | |
| | | | rs9405090 | 32.41 | 0.40 | 0.52 | 3.32 × 10−15 | 1.61 (1.46-1.78) | |
| | | | rs9368713 | 32.41 | 0.40 | 0.52 | 4.92 × 10−15 | 1.61 (1.46-1.78) | |
| | | | rs3135353 | 32.50 | 0.86 | 0.94 | 6.49 × 10−15 | 2.62 (2.15-3.19) | T1D¹⁰ |
| | | | rs547077 | 32.40 | 0.40 | 0.52 | 7.25 × 10−15 | 1.61 (1.45-1.77) | |
| | | | rs2858331 | 32.79 | 0.41 | 0.52 | 2.70 × 10−14 | 1.54 (1.39-1.70) | T1D¹⁰ |
| | | | rs3129943 | 32.45 | 0.76 | 0.85 | 1.06 × 10−13 | 1.90 (1.66-2.17) | T1D¹⁰ |
| | | | rs2395175 | 32.51 | 0.14 | 0.21 | 2.25 × 10−12 | 1.58 (1.40-1.80) | T1D¹⁰ |
| | | | rs4424066 | 32.46 | 0.42 | 0.51 | 4.84 × 10−12 | 1.48 (1.34-1.63) | T1D¹⁰ |
| | | | rs2301271 | 32.83 | 0.58 | 0.68 | 1.04 × 10−11 | 1.55 (1.39-1.71) | T1D¹⁰ |
| | | | rs707928 | 31.85 | 0.67 | 0.76 | 1.42 × 10−11 | 1.57 (1.41-1.76) | T1D¹⁰ |
| | | | rs3115573 | 32.33 | 0.44 | 0.54 | 2.63 × 10−11 | 1.53 (1.38-1.68) | |
| | | | rs2076537 | 32.43 | 0.64 | 0.74 | 2.81 × 10−11 | 1.61 (1.44-1.79) | T1D¹⁰ |
| | | | rs405875 | 32.32 | 0.44 | 0.54 | 3.94 × 10−11 | 1.52 (1.38-1.68) | |
| | | | rs10947262 | 32.48 | 0.92 | 0.96 | 6.01 × 10−11 | 2.18 (1.72-2.76) | |
| | | | rs6941112 | 32.05 | 0.33 | 0.42 | 7.50 × 10−11 | 1.52 (1.37-1.68) | |
| | | | rs11752643 | 32.78 | 0.97 | 0.99 | 6.52 × 10−10 | 5.43 (3.03-9.75) | |
| | | | rs2269426 | 32.18 | 0.40 | 0.50 | 7.08 × 10−10 | 1.46 (1.32-1.61) | T1D¹⁰ |
| | | | rs377763 | 32.31 | 0.79 | 0.86 | 1.03 × 10−08 | 1.61 (1.40-1.84) | T1D¹⁰ |
| | | | rs9276435 | 32.82 | 0.83 | 0.90 | 1.85 × 10−08 | 1.75 (1.50-2.04) | |
| | | | rs8111 | 32.19 | 0.29 | 0.38 | 2.01 × 10−08 | 1.45 (1.31-1.61) | |
| | | | rs3129871 | 32.51 | 0.64 | 0.71 | 2.02 × 10−08 | 1.38 (1.24-1.54) | |
| | | | rs7758736 | 32.87 | 0.83 | 0.90 | 2.07 × 10−08 | 1.72 (1.48-2.01) | T1D¹⁰ |
| | | | rs3104405 | 32.79 | 0.68 | 0.74 | 2.51 × 10−08 | 1.39 (1.25-1.56) | |
| | | | rs2395182 | 32.52 | 0.78 | 0.83 | 5.56 × 10−08 | 1.44 (1.27-1.64) | T1D¹⁰ |
| | | | rs7775397 | 32.37 | 0.90 | 0.95 | 5.91 × 10−08 | 2.36 (1.89-2.94) | T1D¹⁰ |
| | | | rs9275698 | 32.80 | 0.65 | 0.73 | 8.70 × 10−08 | 1.42 (1.27-1.58) | |
| | | | rs17500468 | 32.82 | 0.13 | 0.18 | 1.18 × 10−07 | 1.48 (1.29-1.69) | T1D¹⁰ |
| | | | rs805303 | 31.72 | 0.64 | 0.71 | 1.91 × 10−07 | 1.40 (1.25-1.55) | T1D¹⁰ |
| | | | rs494620 | 31.95 | 0.43 | 0.51 | 3.72 × 10−07 | 1.41 (1.28-1.56) | |
| | | 6_2 | rs16898264 * | 32.79 | 0.37 | 0.53 | 1.66 × 10−32 | 1.95 (1.77-2.16) | T1D¹⁰ |
| | | | rs2856718 | 32.78 | 0.37 | 0.53 | 7.36 × 10−32 | 1.94 (1.75-2.14) | T1D¹⁰ |
| | | | rs2856725 | 32.77 | 0.61 | 0.77 | 7.28 × 10−30 | 2.11 (1.88-2.36) | |
| | | | rs2858305 | 32.78 | 0.62 | 0.77 | 1.67 × 10−28 | 2.07 (1.85-2.32) | |
| | | | rs9268615 | 32.51 | 0.39 | 0.54 | 1.22 × 10−25 | 1.85 (1.67-2.04) | T1D¹⁰ |
| | | | rs3129890 | 32.52 | 0.74 | 0.85 | 7.00 × 10−19 | 1.97 (1.73-2.25) | |
| | | | rs9268530 | 32.49 | 0.84 | 0.93 | 9.00 × 10−19 | 2.68 (2.24-3.22) | T1D¹⁰ |
| | | | rs7745656 | 32.79 | 0.29 | 0.40 | 6.71 × 10−17 | 1.62 (1.46-1.79) | RA |
| | | | rs3130340 | 32.35 | 0.78 | 0.89 | 1.42 × 10−16 | 2.15 (1.86-2.49) | T1D¹⁰ |
| | | | rs2858332 | 32.79 | 0.51 | 0.63 | 2.46 × 10−16 | 1.62 (1.46-1.79) | |
| | | | rs1980493 | 32.47 | 0.85 | 0.94 | 8.63 × 10−16 | 2.60 (2.15-3.14) | T1D¹⁰ |
| | | | rs1033500 | 32.42 | 0.40 | 0.52 | 4.63 × 10−15 | 1.61 (1.46-1.78) | |
| | | | rs12177980 | 32.79 | 0.41 | 0.52 | 5.05 × 10−14 | 1.54 (1.40-1.70) | T1D¹⁰ |
| | | | rs6903130 | 32.84 | 0.50 | 0.61 | 1.73 × 10−13 | 1.56 (1.41-1.73) | T1D¹⁰ |
| | | | rs2051549 | 32.84 | 0.58 | 0.69 | 6.30 × 10−13 | 1.60 (1.44-1.78) | T1D¹⁰ |
| | | | rs13199787 | 32.81 | 0.42 | 0.52 | 8.76 × 10−13 | 1.52 (1.38-1.68) | T1D¹⁰ |
| | | | rs3817973 | 32.47 | 0.42 | 0.51 | 3.43 × 10−12 | 1.48 (1.34-1.64) | T1D¹⁰ |
| | | | rs2859078 | 32.81 | 0.79 | 0.87 | 9.09 × 10−12 | 1.76 (1.53-2.03) | |
| | | | rs2395174 | 32.51 | 0.72 | 0.82 | 1.11 × 10−11 | 1.71 (1.51-1.93) | T1D¹⁰ |
| | | | rs1063355 | 32.74 | 0.58 | 0.66 | 2.46 × 10−11 | 1.40 (1.27-1.56) | T1D¹⁰ |
| | | | rs3130315 | 32.33 | 0.44 | 0.54 | 2.71 × 10−11 | 1.53 (1.38-1.68) | |
| | | | rs3129939 | 32.44 | 0.83 | 0.91 | 3.35 × 10−11 | 2.11 (1.79-2.49) | T1D¹⁰ |
| | | | rs6901084 | 32.84 | 0.44 | 0.54 | 3.27 × 10−10 | 1.47 (1.33-1.63) | T1D¹⁰ |
| | | | rs7756516 | 32.83 | 0.50 | 0.59 | 6.59 × 10−10 | 1.46 (1.33-1.62) | T1D¹⁰ |
| | | | rs10807113 | 32.83 | 0.50 | 0.59 | 8.02 × 10−10 | 1.46 (1.32-1.61) | T1D¹⁰ |
| | | | rs9267947 | 32.32 | 0.55 | 0.64 | 2.08 × 10−09 | 1.47 (1.33-1.63) | |
| | | | rs652888 | 31.96 | 0.80 | 0.87 | 2.58 × 10−08 | 1.72 (1.49-1.98) | T1D¹⁰ |
| | | | rs389883 | 32.06 | 0.71 | 0.79 | 9.05 × 10−08 | 1.54 (1.37-1.73) | |
| | | | rs2442749 | 31.46 | 0.72 | 0.78 | 1.19 × 10−07 | 1.44 (1.28-1.62) | T1D¹⁰ |
| | | | rs805294 | 31.80 | 0.65 | 0.72 | 3.67 × 10−07 | 1.39 (1.25-1.55) | T1D¹⁰ |
| | | | rs1270942 | 32.03 | 0.90 | 0.95 | 4.49 × 10−07 | 2.18 (1.76-2.70) | T1D¹⁰ |
| | | | rs389884 | 32.05 | 0.90 | 0.95 | 4.97 × 10−07 | 2.18 (1.76-2.71) | T1D¹⁰ |
| | | 6_3 | rs3130320 * | 32.33 | 0.64 | 0.77 | 5.64 × 10−19 | 1.88 (1.68-2.11) | |
| | | | rs9275224 | 32.77 | 0.51 | 0.63 | 3.60 × 10−17 | 1.65 (1.49-1.83) | |
| | | | rs3115553 | 32.35 | 0.78 | 0.89 | 1.49 × 10−16 | 2.15 (1.85-2.48) | T1D¹⁰ |
| | | | rs9268132 | 32.36 | 0.40 | 0.52 | 1.58 × 10−15 | 1.62 (1.47-1.79) | |
| | | | rs9268384 | 32.44 | 0.40 | 0.52 | 3.41 × 10−15 | 1.62 (1.46-1.78) | |
| | | | rs9461799 | 32.80 | 0.41 | 0.52 | 6.01 × 10−14 | 1.54 (1.40-1.70) | T1D¹⁰ |
| | | | rs7453920 | 32.84 | 0.58 | 0.68 | 1.79 × 10−11 | 1.54 (1.39-1.71) | T1D¹⁰ |
| | | | rs9275686 | 32.80 | 0.80 | 0.88 | 1.96 × 10−11 | 1.78 (1.54-2.05) | |
| | | | rs9275659 | 32.79 | 0.80 | 0.88 | 2.63 × 10−11 | 1.77 (1.54-2.04) | |
| | | | rs2076530 | 32.47 | 0.42 | 0.51 | 1.08 × 10−10 | 1.45 (1.31-1.60) | T1D¹⁰ |
| | | | rs1003878 | 32.41 | 0.78 | 0.87 | 1.90 × 10−10 | 1.81 (1.58-2.08) | T1D¹⁰ |
| | | | rs2072633 | 32.03 | 0.58 | 0.67 | 3.60 × 10−10 | 1.51 (1.36-1.68) | |
| | | | rs4151657 | 32.03 | 0.36 | 0.44 | 3.21 × 10−08 | 1.43 (1.30-1.58) | |
| | | | rs2187668 | 32.71 | 0.89 | 0.94 | 4.01 × 10−08 | 2.15 (1.76-2.62) | CeD¹⁷, |
| | | | | | | | | | SLE¹⁵ |
| | | | rs1077393 | 31.72 | 0.50 | 0.58 | 5.89 × 10−08 | 1.39 (1.26-1.54) | T1D¹⁰ |
| | | | rs1794282 | 32.77 | 0.90 | 0.96 | 5.99 × 10−08 | 2.36 (1.89-2.95) | T1D¹⁰ |
| | | | rs437179 | 32.04 | 0.71 | 0.79 | 8.48 × 10−08 | 1.54 (1.37-1.73) | |
| | | | rs6911628 | 30.85 | 0.73 | 0.81 | 2.80 × 10−07 | 1.50 (1.32-1.69) | T1D¹⁰ |
| | | 6_4 | rs3763312 * | 32.48 | 0.20 | 0.30 | 2.53 × 10−16 | 1.70 (1.52-1.89) | T1D¹⁰ |
| | | | rs2070600 | 32.26 | 0.04 | 0.08 | 1.15 × 10−10 | 1.94 (1.59-2.37) | |
| | | | rs2071800 | 32.82 | 0.07 | 0.11 | 1.06 × 10−09 | 1.78 (1.51-2.10) | |
| | | 6_5 | rs6910071 * | 32.39 | 0.18 | 0.26 | 2.95 × 10−13 | 1.57 (1.40-1.76) | T1D¹⁰ |
| | | | rs2395163 | 32.50 | 0.20 | 0.28 | 1.51 × 10−11 | 1.56 (1.39-1.75) | T1D¹⁰ |
| | | | rs3104404 | 32.79 | 0.20 | 0.27 | 5.54 × 10−08 | 1.44 (1.28-1.61) | T1D¹⁰ |
| | | | rs17429444 | 32.89 | 0.11 | 0.16 | 3.93 × 10−07 | 1.53 (1.33-1.76) | |

* indicates marker is used as a proxy to represent the group of highly correlated SNPs. Type I diabetes (T1D), rheumatoid arthritis (RA), celiac disease (CeD), multiple sclerosis (MS), system lupus erythematosus (SLE), primary biliary cirrhosis (PBC).

TABLE 4
Immune related genes with nominal significance.

| | | Count of | Min | Min | | |
|---|---|---|---|---|---|---|
| | | SNPs < | p-value | p-value | Autoimmune | GO |
| Gene | Mb | 1 × 10⁻⁴ | observed | imputed | Reports | classification |
| Chromosome 2 | | | | | | |
| HDAC4 | 240.03 | 1 | 8.10E−05 | 5.59E−05 | | inflammatory |
| | | | | | | response |
| Chromosome 3 | | | | | | |
| CACNA2D3 | 55.02 | 1 | 7.28E−05 | 1.47E−05 | CeD | |
| Chromosome 5 | | | | | | |
| IL13 | 132.02 | 2 | 1.87E−06 | | Asthma | immune |
| | | | | | | response |
| Chromosome 6 | | | | | | |
| HLA-G | 29.94 | 1 | 1.07E−04 | 4.54E−06 | RA, MS, SLE, | immune |
| | | | | | PS, T1D, | response |
| | | | | | Asthma, | |
| HLA-A | 30.01 | 1 | 1.00E−04 | 2.72E−05 | MS, T1D, PS, | immune |
| | | | | | GD, | response |
| | | | | | Asthma, Vitilago | |
| MICB | 31.59 | 2 | 1.89E−05 | 1.97E−05 | MS, T1D, UC, | immune |
| | | | | | RA, CeD, | response |
| | | | | | Asthma | |
| TAP2 | 32.91 | 1 | 6.42E−06 | 1.28E−05 | T1D, RA, SLE, | immune |
| | | | | | PS, GD | response |
| Chromosome 7 | | | | | | |
| IL6 | 22.72 | 2 | 7.72E−05 | 4.84E−05 | RA, T1D, CeD | inflammatory |
| | | | | | | response |
| CHCHD3 | 132.44 | 1 | 3.07E−05 | 2.02E−05 | CeD | |
| Chromosome 8 | | | | | | |
| CSMD1 | 3.02 | 1 | 8.65E−05 | 8.38E−05 | CeD, MS | |
| Chromosome 12 | | | | | | |
| IFNG | 66.84 | 1 | 1.55E−05 | 1.29E−05 | CeD, T1D, RA, | |
| | | | | | MS, SLE, PS, | |
| | | | | | GD, Asthma | |
| IL26 | 66.87 | 2 | 7.18E−05 | 6.45E−05 | MS, Asthma | immune |
| | | | | | | response |
| Chromosome 16 | | | | | | |
| KIAA0350 | 11.11 | 6 | 1.77E−05 | 1.15E−05 | T1D, MS, | |
| (CLEC16A) | | | | | Thyroid | |
| | | | | | Disease | |
| SOCS1 | 11.24 | 2 | 1.16E−05 | 8.66E−06 | CeD, T1D, | |
| | | | | | Asthma | |
| Chromosome 18 | | | | | | |
| ANKRD12 | 9.25 | 2 | 3.59E−05 | 1.55E−05 | | |
| PTPN2 | 12.80 | 1 | 4.09E−06 | 3.38E−07 | CD, T1D | |

[0356] Celiac Disease (CeD), rheumatoid arthritis (RA), multiple sclerosis (MS), system lupus erythematosus (SLE), psoriasis (PS), type I diabetes (T1D), Graves disease (GD).

TABLE 5
Population Attributable Fractions.

| | | | | | 95% Wald | | | Population |
|---|---|---|---|---|---|---|---|---|
| | | Frequency | Percent | Odds | Confidence | | | Attributable |
| | | (control) | (control) | Ratio | Limits | | P-value | Fraction |
| Chromosome 2q33.2 | GG | 1149 | 35.84 | 1.00 | | | | |
| rs1024161 | AG | 1527 | 47.63 | 1.45 | 1.226 | 1.706 | <.0001 | |
| | AA | 530 | 16.53 | 2.06 | 1.685 | 2.509 | <.0001 | 27.90% |
| Chromosome 4q24 | CC | 1438 | 44.03 | 1.00 | | | | |
| rs7682241 | AC | 1468 | 44.95 | 1.22 | 1.048 | 1.421 | 0.0105 | |
| | AA | 360 | 11.02 | 1.90 | 1.540 | 2.344 | <.0001 | 16.53% |
| Chromosome 6p21.3 | AA | 571 | 17.44 | 1.00 | | | | |
| rs9275572 | AG | 1561 | 47.66 | 2.57 | 0.414 | 0.557 | <.0001 | |
| | GG | 1143 | 34.9 | 5.36 | 0.139 | 0.250 | <.0001 | 69.44% |
| Chromosome 6q25 | GG | 621 | 19.01 | 1.00 | | | | |
| rs9479482 | GA | 1587 | 48.59 | 1.57 | 0.516 | 0.696 | <.0001 | |
| | AA | 1058 | 32.39 | 2.62 | 0.303 | 0.479 | <.0001 | 44.56% |
| Chromosome 9q31.1 | AA | 1491 | 45.5 | 1.00 | | | | |
| rs1997368 | CA | 1411 | 43.06 | 1.38 | 1.182 | 1.600 | <.0001 | |
| | CC | 375 | 11.44 | 1.74 | 1.401 | 2.149 | <.0001 | 19.71% |
| Chromosome 10p15.1 | AA | 1528 | 46.66 | 1.00 | | | | |
| rs3118470 | GA | 1435 | 43.82 | 1.26 | 1.084 | 1.462 | 0.0026 | |
| | GG | 312 | 9.53 | 1.83 | 1.467 | 2.285 | <.0001 | 16.16% |
| Chromosome 11q13 | GG | 428 | 13.06 | 1.00 | | | | |
| rs694739 | GA | 1563 | 47.68 | 1.13 | 0.601 | 0.808 | 0.3001 | |
| | AA | 1287 | 39.26 | 1.63 | 0.485 | 0.778 | <.0001 | 23.69% |
| Chromosome 12q13 | AA | 1566 | 47.79 | 1.00 | | | | |
| rs1701704 | GA | 1441 | 43.97 | 1.35 | 1.166 | 1.572 | <.0001 | |
| | GG | 270 | 8.24 | 2.13 | 1.695 | 2.677 | <.0001 | 19.92% |

SNPs for which the major allele is associated with risk.

TABLE 6
Comparison of AA GWAS findings to published
AA candidate gene studies.

| | | | No. of | most signif- |
|---|---|---|---|---|
| Conclu- | | | published | icant SNP in |
| sion in | | | AA candidate | AA GWAS |
| Literature | | Gene | gene studies | (pvalue) |
| Asso- | non-HLA | PTPN22 | 2 | 1.98 × 10⁻⁴ |
| ciation | | FLG2 | 1 | 0.24 |
| | | IL1RN | 1 | 0.07 |
| | | MIF | 1 | 0.54 |
| | | NOS3 | 1 | 0.32 |
| | | AIRE* | 2 | 0.05 |
| | HLA | NOTCH4 | 1 | 1.03 × 10⁻⁸ |
| | | HLA-DRB1 | 5 | 9.03 × 10⁻²³ |
| | | HLA-A | 3 | 1.0 × 10⁻⁰⁴ |
| | | HLA-B | 3 | 0.05 |
| | | HLA-DQB1 | 3 | 2.46 × 10⁻¹¹ |
| | | HLA-C | 2 | 0.03 |
| | | MICA | 1 | 1.19 × 10⁻⁷ |
| | | HLA-DQA1 | 2 | 4.01 × 10⁻⁸ |
| No | HLA | VDR | 2 | 0.03 |
| Asso- | | FCRL3 | 1 | 0.13 |
| ciation | | IL1B | 1 | 0.05 |
| | | CCL2 | 1 | 0.37 |
| | | IL1A | 1 | 0.55 |
| | | AIRE* | 1 | 0.05 |

### REFERENCES

[0357] A1. Safavi K H, Muller S A, Suman V J, Moshell A N, Melton L J, 3rd. Incidence of alopecia areata in Olmsted County, Minnesota, 1975 through 1989. Mayo Clin Proc 1995; 70:628-33.
[0358] A2. Jelinek J E. Sudden whitening of the hair. Bull N Y Acad Med 1972; 48:1003-13.
[0359] A3. Ito T, Ito N, Saatoff M, et al. Maintenance of hair follicle immune privilege is linked to prevention of NK cell attack. The Journal of investigative dermatology 2008; 128:1196-206.
[0360] A4. Todes-Taylor N, Turner R, Wood G S, Stratte P T, Morhenn V B. T cell subpopulations in alopecia areata. J Am Acad Dermatol 1984; 1 1:216-23.
[0361] A5. Gilhar A, Landau M, Assy B, et al. Transfer of alopecia areata in the human scalp graft/Prkdc(scid) (SCID) mouse system is characterized by a TH1 response. Clin Immunol 2003; 106:181-7.
[0362] A6. Gilhar A, Shalaginov R, Assy B, Serafimovich S, Kalish R S. Alopecia areata is a T-lymphocyte mediated autoimmune disease: lesional human T-lymphocytes transfer alopecia areata to human skin grafts on SCID mice. J Investig Dermatol Symp Proc 1999; 4:207-10.
[0363] A7. Zoller M, McElwee K J, Engel P, Hoffmann R. Transient CD44 variant isoform expression and reduction in CD4(+)/CD25(+) regulatory T cells in C3H/HeJ mice with alopecia areata. The Journal of investigative dermatology 2002; 1 18:983-92.
[0364] A8. McElwee K J, Freyschmidt-Paul P, Hoffmann R, et al. Transfer of CD8(+) cells induces localized hair loss whereas CD4(+)/CD25(−) cells promote systemic alopecia areata and CD4(+)/CD25(+) cells blockade disease onset in the C3H/HeJ mouse model. The Journal of investigative dermatology 2005; 124:947-57.
[0365] A9. Ito T, Meyer K C, Ito N, Paus R. Immune privilege and the skin. Curr Dir Autoimmun 2008; 10:27-52.
[0366] A10. McDonagh A J, Tazi-Ahnini R. Epidemiology and genetics of alopecia areata. Clin Exp Dermatol 2002; 27:405-9.
[0367] A11. van der Steen P, Traupe H, Happle R, Boezeman J, Strater R, Hamm H. The genetic risk for alopecia areata in first degree relatives of severely affected patients. An estimate. Acta Derm Venereol 1992; 72:373-5.
[0368] A12. Jackow C, Puffer N, Hordinsky M, Nelson J, Tarrand J, Duvic M. Alopecia areata and cytomegalovirus infection in twins: genes versus environment? J Am Acad Dermatol 1998; 38:418-25.
[0369] A13. Martinez-Mir A, Zlotogorski A, Gordon D, et al. Genomewide scan for linkage reveals evidence of several susceptibility loci for alopecia areata. Am J Hum Genet. 2007; 80:316-28.
[0370] N1. Safavi, K. H., Muller, S. A., Suman, V. J., Moshell, A. N. & Melton, L. J., 3rd. Incidence of alopecia areata in Olmsted County, Minnesota, 1975 through 1989. Mayo Clin Proc 70, 628-33 (1995).
[0371] N2. Jelinek, J. E. Sudden whitening of the hair. Bull N Y Acad Med 48, 1003-13 (1972).
[0372] N3. Gilhar, A., Paus, R. & Kalish, R. S. Lymphocytes, neuropeptides, and genes involved in alopecia areata. J Clin Invest 117, 2019-27 (2007).
[0373] N4. Ito, T., Meyer, K. C., Ito, N. & Paus, R. Immune privilege and the skin. Curr Dir Autoimmun 10, 27-52 (2008).
[0374] N5. McDonagh, A. J. & Tazi-Ahnini, R. Epidemiology and genetics of alopecia areata. Clin Exp Dermatol 27, 405-9 (2002).
[0375] N6. van der Steen, P. et al. The genetic risk for alopecia areata in first degree relatives of severely affected patients. An estimate. Acta Derm Venereol 72, 373-5 (1992).
[0376] N7. Jackow, C. et al. Alopecia areata and cytomegalovirus infection in twins: genes versus environment? J Am Acad Dermatol 38, 418-25 (1998).
[0377] N8. Martinez-Mir, A. et al. Genomewide scan for linkage reveals evidence of several susceptibility loci for alopecia areata. Am J Hum Genet. 80, 316-28 (2007).
[0378] N9. Duvic, M., Norris, D., Christiano, A., Hordinsky, M. & Price, V. Alopecia areata registry: an overview. J Investig Dermatol Symp Proc 8, 219-21 (2003).
[0379] N10. Mitchell, M. K., Gregersen, P. K., Johnson, S., Parsons, R. & Vlahov, D. The New York Cancer Project: rationale, organization, design, and baseline characteristics. J Urban Health 81, 301-10 (2004).
[0380] N11. Hunter, D. J. et al. A genome-wide association study identifies alleles in FGFR2 associated with risk of sporadic postmenopausal breast cancer. Nat Genet. 39, 870-4 (2007).
[0381] N12. Yeager, M. et al. Genome-wide association study of prostate cancer identifies a second risk locus at 8q24. Nat Genet. 39, 645-9 (2007).
[0382] N13. Hindorff, L. A. et al. Potential etiologic and functional implications of genome-wide association loci for human diseases and traits. Proc Natl Acad Sci USA 106, 9362-7 (2009).
[0383] N14. Radosavljevic, M. et al. A cluster of ten novel MHC class I related genes on human chromosome 6q24.2-q25.3. Genomics 79, 114-23 (2002).
[0384] N15. Eagle, R. A. & Trowsdale, J. Promiscuity and the single receptor: NKG2D. Nat Rev Immunol 7, 737-44 (2007).
[0385] N16. Eagle, R. A., Traherne, J. A., Hair, J. R., Jafferji, I. & Trowsdale, J. ULBP6/RAET1L is an additional human NKG2D ligand. Eur J Immunol (2009).
[0386] N17. Caillat-Zucman, S. How NKG2D ligands trigger autoimmunity? Hum Immunol 67, 204-7 (2006).
[0387] N18. Strid, J. et al. Acute upregulation of an NKG2D ligand promotes rapid reorganization of a local immune compartment with pleiotropic effects on carcinogenesis. Nat Immunol 9, 146-54 (2008).
[0388] N19. Ito, T. et al. Maintenance of hair follicle immune privilege is linked to prevention of NK cell attack. J Invest Dermatol 128, 1196-206 (2008).
[0389] N20. Cetin, E. D., Savk, E., Uslu, M., Eskin, M. & Karul, A. Investigation of the inflammatory mechanisms in alopecia areata. Am J Dermatopathol 31, 53-60 (2009).
[0390] N21. Zhang, Q., Li, J., Deavers, M., Abbruzzese, J. L. & Ho, L. The subcellular localization of syntaxin 17 varies among different cell types and is altered in some malignant cells. J Histochem Cytochem 53, 1371-82 (2005).
[0391] N22. Rosengren Pielberg, G. et al. A cis-acting regulatory mutation causes premature hair graying and susceptibility to melanoma in the horse. Nat Genet. 40, 1004-9 (2008).
[0392] N23. Holley, J. E., Newcombe, J., Winyard, P. G. & Gutowski, N.J. Peroxiredoxin V in multiple sclerosis lesions: predominant expression by astrocytes. Mult Scler 13, 955-61 (2007).
[0393] N24. Colombe, L., Michelet, J. F. & Bernard, B. A. Prostanoid receptors in anagen human hair follicles. Exp Dermatol 17, 63-72 (2008).
[0394] N25. Libioulle, C. et al. Novel Crohn disease locus identified by genome-wide association maps to a gene desert on 5p13.1 and modulates expression of PTGER4. PLoS Genet. 3, e58 (2007).
[0395] N26. WTCCC. Genome-wide association study of 14,000 cases of seven common diseases and 3,000 shared controls. Nature 447, 661-678 (2007).
[0396] N27. De Jager, P. L. et al. Meta-analysis of genome scans and replication identify CD6, IRF8 and TNFRSF1A as new multiple sclerosis susceptibility loci. Nat Genet. 41, 776-82 (2009).
[0397] N28. Kabashima, K. et al. Prostaglandin E2-EP4 signaling initiates skin immune responses by promoting migration and maturation of Langerhans cells. Nat Med 9, 744-9 (2003).
[0398] N29. Pan, F. et al. Eos mediates Foxp3-dependent gene silencing in CD4+ regulatory T cells. Science 325, 1142-6 (2009).
[0399] N30. Wing, K. et al. CTLA-4 control over Foxp3+ regulatory T cell function. Science 322, 271-5 (2008).
[0400] N31. Monteleone, G., Pallone, F. & Macdonald, T. T. Interleukin-21 as a new therapeutic target for immune-mediated diseases. Trends Pharmacol Sci 30, 441-7 (2009).
[0401] N32. Gregersen, P. K. & Olsson, L. M. Recent advances in the genetics of autoimmune disease. Annu Rev Immunol 27, 363-91 (2009).
[0402] N33. Purcell, S. et al. PLINK: a tool set for whole-genome association and population-based linkage analyses. Am J Hum Genet. 81, 559-75 (2007).
[0403] N34. Tian, C. et al. European Population Genetic Substructure: Further Definition of Ancestry Informative Markers for Distinguishing Among Diverse European Ethnic Groups. Mol Med (2009).
[0404] N35. Barrett, J. C., Fry, B., Mailer, J. & Daly, M. J. Haploview: analysis and visualization of LD and haplotype maps. Bioinformatics 21, 263-5 (2005).
[0405] N36. Bazzi, H. et al. Desmoglein 4 is expressed in highly differentiated keratinocytes and trichocytes in human epidermis and hair follicle. Differentiation 74, 129-40 (2006).

### Example 2

### Study Samples, Genotyping, Quality Control and Population Stratification

### Study Samples

[0406] Cases were ascertained through the National Alopecia Areata Registry (NAAR) which recruits patients in the US primarily through five clinical sites.^{S1} In the course of enrollment, patients provided medical and family history as well as demographic information. Diagnosis was confirmed by clinical examiners prior to collecting blood samples. Written informed consent was obtained from all participants. The study was approved by the local IRB committees. In order to reduce the possibility of confounding from population stratification, only patients who self-reported European ancestry were selected for genotyping. Cases were genotyped with the Illumina 610K chip.

[0407] The control data used in the discovery GWAS was obtained from subjects enrolled in the New York Cancer Project^{S2} and genotyped as part of previous studies.^{S3}

[0408] For the replication data set, control data was obtained from the CGEMS breast^{S4} and prostate^{S5} cancer studies (http://cgems.cancer.gov/data/). The controls for the breast cancer arm of CGEMs were women from the Nurses Health Study^{S6} who were postmenopausal and had not diagnosed been with breast cancer during follow-up, and were matched to breast cancer cases based on age at diagnosis, blood collection variables (time of day, season, and year of blood collection, as well as recent (<3 months) use of postmenopausal hormones), ethnicity (all cases and controls are self-reported Caucasians), and menopausal status (all cases were postmenopausal at diagnosis).

[0409] Of the 1,184 controls that were originally genotyped, 1,142 controls met quality control requirements and have been distributed through the CGEMS portal. Genotyping of the CGEMS Breast Cancer Study was performed by the NCI Core Genotyping Facility using the Sentrix HumanHap550 genotyping assay. The controls for the prostate cancer arm of CGEMS were derived from participants in the PLCO trial and were matched via a density sampling procedure to cases. 1,204 different men, representing 1230 control selections, were identified as controls and were subsequently genotyped. Of these, 1094 passed quality control steps and have been made available for use by external investigators. Genotyping of the CGEMS Prostate Cancer Study was performed under contract by Illumina Corporation in two parts, Phase x1A used the Sentrix® HumanHap300 genotyping assay and Phase 1B used the Sentrix® HumanHap240.^{S7-S9} Of the 2358 individuals that were retained for previous analyses using CGEMS, 2243 were distributed via the CGEMs portal (http://cgems.cancer.gov/data/) for general analysis. Further filtering to remove individuals who had low call rate (<95%, 7 prostrate controls), leaving a total of 2236 combined breast and prostate controls for analysis.

[0410] Association Analysis.

[0411] Joint analysis of the discovery and replication cohorts identified 141 SNPs that exceed the threshold for genome-wide significance (p<5 10⁻⁷), implicating 10 regions within the genome. Some of these SNPs have been identified in a GWAS for another autoimmune disease (http://www.genome.gov/gwastudies/): type I diabetes (T1D),^{S10,S11} rheumatoid arthritis (RA),^{S3,S11,S14} systemic lupus erythematosus (SLE),^{S15,S16} multiple sclerosis (MS)^{S11}, celiac disease (CeD),^{S17} or primary biliary cirrhosis (PBC).^{S18} SNPs that were used to obtain the Genetic Liability Index (GLI) are marked with an asterisk. An additional 163 SNPs with nominal significance (1×10⁻⁴>p>5×10⁻⁷) implicate additional immune-related genes. Genes are classified as immune-related either because they were reported as associated with an autoimmune disease (http://hugenavigator.net/) or have been annotated as immune or inflammatory by the Gene Ontology project (http://www.geneontology.org/).

[0412] Imputation allowed us to infer genotypes for an additional 2,088,685 SNPs, of which 835 exceed significance of 5×10⁻⁷. Of these, 661 fall within the HLA region. Table 13 lists the 174 significant imputed SNPs that are not in the HLA. Population attributable risk is calculated for independent risk loci (Table 5). Previous to our GWAS, several reports of candidate gene studies have presented evidence for associations in HLA-residing genes (HLA-DQB1, HLA-DRB1, HLA-A, HLA-B, HLA-C, NOTCH4, MICA), as well as genes outside of the HLA (PTPN22, AIRE).^{P24} We compared these findings to results from our GWAS and found that associations to HLA DRB1, HLA-DQB1, HLA-DQA1, and MICA were confirmed (Table 6).

TABLE 13
Statistically significant (p < 5 × 10−7) results
for imputed SNPs in regions outside of the HLA.

| | | position | | | | | | | |
|---|---|---|---|---|---|---|---|---|---|
| chr | SNP | (bp) | alleles | A1 | FREQ1 | OR (L95, U95) | | pvalue | RSQR |
| 2 | rs3116513 | 204402856 | A < G | A | 0.42 | 1.46 | (1.32, 1.61) | 2.5E−13 | 0.971 |
| 2 | rs12992492 | 204409799 | A < G | G | 0.59 | 1.46 | (1.32, 1.61) | 3.6E−13 | 0.986 |
| 2 | rs231775 | 204440959 | A < G | G | 0.62 | 1.44 | (1.3, 1.59) | 3.2E−12 | 0.974 |
| 2 | rs231779 | 204442732 | C < T | T | 0.62 | 1.44 | (1.3, 1.59) | 3.2E−12 | 0.977 |
| 2 | rs11571315 | 204439146 | C < T | T | 0.61 | 1.43 | (1.29, 1.58) | 4.3E−12 | 0.964 |
| 2 | rs3087243 | 204447164 | A < G | A | 0.42 | 0.7 | (0.63, 0.77) | 6.0E−12 | 0.949 |
| 2 | rs736611 | 204438710 | C < T | C | 0.40 | 1.42 | (1.28, 1.57) | 1.1E−11 | 0.966 |
| 2 | rs11571292 | 204428384 | A < G | A | 0.41 | 1.41 | (1.28, 1.57) | 1.7E−11 | 0.995 |
| 2 | rs231770 | 204437398 | C < T | T | 0.60 | 1.41 | (1.28, 1.56) | 1.9E−11 | 0.981 |
| 2 | rs1427680 | 204438040 | A < G | G | 0.60 | 1.41 | (1.28, 1.56) | 1.9E−11 | 0.971 |
| 2 | rs231746 | 204398600 | C < G | G | 0.51 | 0.71 | (0.64, 0.78) | 1.9E−11 | 0.910 |
| 2 | rs11571316 | 204439334 | A < G | A | 0.42 | 0.7 | (0.63, 0.78) | 2.8E−11 | 0.945 |
| 2 | rs960792 | 204457495 | C < T | C | 0.47 | 0.71 | (0.64, 0.79) | 2.9E−11 | 0.992 |
| 2 | rs7600322 | 204462598 | C < T | C | 0.47 | 0.71 | (0.64, 0.79) | 2.9E−11 | 0.996 |
| 2 | rs6748358 | 204465150 | A < C | A | 0.47 | 0.71 | (0.64, 0.79) | 2.9E−11 | 0.996 |
| 2 | rs1427678 | 204466603 | A < G | A | 0.47 | 0.71 | (0.64, 0.79) | 2.9E−11 | 0.996 |
| 2 | rs17268364 | 204486063 | A < G | A | 0.47 | 0.71 | (0.64, 0.79) | 2.9E−11 | 0.988 |
| 2 | rs11571293 | 204425958 | G < T | T | 0.61 | 0.7 | (0.63, 0.78) | 4.5E−11 | 0.986 |
| 2 | rs231811 | 204422136 | G < T | G | 0.40 | 0.7 | (0.63, 0.78) | 4.6E−11 | 0.985 |
| 2 | rs11571291 | 204429377 | C < T | C | 0.40 | 0.7 | (0.63, 0.78) | 6.0E−11 | 0.994 |
| 2 | rs1024162 | 204430404 | A < T | T | 0.60 | 0.7 | (0.63, 0.78) | 6.0E−11 | 0.994 |
| 2 | rs6745050 | 204399783 | C < T | T | 0.59 | 0.71 | (0.64, 0.79) | 1.2E−10 | 0.960 |
| 2 | rs1968351 | 204401981 | A < C | C | 0.59 | 0.71 | (0.64, 0.79) | 1.2E−10 | 0.979 |
| 2 | rs13030124 | 204402508 | A < G | A | 0.40 | 0.71 | (0.64, 0.79) | 1.2E−10 | 0.997 |
| 2 | rs11571304 | 204417021 | A < T | A | 0.40 | 0.71 | (0.64, 0.79) | 2.2E−10 | 0.996 |
| 2 | rs231806 | 204417594 | C < G | C | 0.40 | 0.71 | (0.64, 0.79) | 2.2E−10 | 0.992 |
| 2 | rs863603 | 204403219 | C < T | C | 0.46 | 0.72 | (0.65, 0.8) | 2.4E−10 | 0.998 |
| 2 | rs231734 | 204402525 | A < G | G | 0.54 | 0.72 | (0.65, 0.8) | 2.7E−10 | 0.999 |
| 2 | rs231733 | 204402710 | A < G | A | 0.46 | 0.72 | (0.65, 0.8) | 2.7E−10 | 0.999 |
| 2 | rs6715389 | 204402866 | C < T | C | 0.46 | 0.72 | (0.65, 0.8) | 2.7E−10 | 0.998 |
| 2 | rs3115969 | 204403050 | C < T | T | 0.54 | 0.72 | (0.65, 0.8) | 2.7E−10 | 0.998 |
| 2 | rs231810 | 204420388 | A < G | A | 0.46 | 0.72 | (0.65, 0.8) | 3.5E−10 | 0.962 |
| 2 | rs10490516 | 204404033 | C < T | C | 0.46 | 0.72 | (0.65, 0.8) | 3.5E−10 | 0.998 |
| 2 | rs231790 | 204408819 | G < T | G | 0.46 | 0.72 | (0.65, 0.8) | 3.9E−10 | 0.998 |
| 2 | rs231789 | 204408197 | C < T | C | 0.46 | 0.72 | (0.65, 0.8) | 4.9E−10 | 0.998 |
| 2 | rs231797 | 204414352 | A < G | A | 0.46 | 0.73 | (0.66, 0.8) | 5.5E−10 | 0.998 |
| 2 | rs231799 | 204415662 | C < T | C | 0.46 | 0.73 | (0.66, 0.8) | 5.5E−10 | 0.998 |
| 2 | rs231800 | 204415830 | C < G | G | 0.54 | 0.73 | (0.66, 0.8) | 5.5E−10 | 0.998 |
| 2 | rs231725 | 204448920 | A < G | A | 0.33 | 1.37 | (1.24, 1.52) | 2.9E−09 | 0.991 |
| 2 | rs1427676 | 204449411 | C < T | C | 0.33 | 1.37 | (1.24, 1.52) | 2.9E−09 | 0.993 |
| 2 | rs231727 | 204449795 | A < G | A | 0.33 | 1.37 | (1.24, 1.52) | 2.9E−09 | 0.992 |
| 2 | rs1365965 | 204460115 | C < T | C | 0.33 | 1.35 | (1.22, 1.5) | 1.6E−08 | 0.994 |
| 2 | rs2352546 | 204466991 | A < G | G | 0.67 | 1.35 | (1.22, 1.5) | 1.6E−08 | 0.998 |
| 2 | rs3096852 | 204472663 | C < T | C | 0.33 | 1.35 | (1.22, 1.5) | 1.6E−08 | 1.000 |
| 2 | rs3116523 | 204473059 | G < T | T | 0.67 | 1.35 | (1.22, 1.5) | 1.6E−08 | 1.000 |
| 2 | rs7596727 | 204491827 | C < T | T | 0.51 | 1.33 | (1.2, 1.47) | 2.4E−08 | 0.986 |
| 2 | rs13029135 | 204492457 | A < C | C | 0.51 | 1.33 | (1.2, 1.47) | 2.6E−08 | 0.986 |
| 2 | rs10932027 | 204494719 | A < G | G | 0.51 | 1.33 | (1.2, 1.47) | 2.8E−08 | 0.986 |
| 2 | rs2033171 | 204496401 | C < T | T | 0.51 | 1.33 | (1.2, 1.47) | 2.8E−08 | 0.986 |
| 2 | rs3116521 | 204489086 | C < G | G | 0.51 | 1.33 | (1.2, 1.47) | 3.2E−08 | 0.986 |
| 2 | rs1896493 | 204500654 | A < G | G | 0.51 | 1.33 | (1.2, 1.46) | 3.2E−08 | 0.986 |
| 2 | rs1978594 | 204499714 | G < T | G | 0.49 | 1.32 | (1.2, 1.46) | 4.2E−08 | 0.984 |
| 2 | rs1978595 | 204499774 | C < T | C | 0.49 | 1.32 | (1.2, 1.46) | 4.5E−08 | 0.984 |
| 2 | rs3116505 | 204487426 | C < T | T | 0.67 | 1.34 | (1.2, 1.48) | 5.0E−08 | 0.992 |
| 2 | rs11571310 | 204501543 | C < T | C | 0.49 | 1.32 | (1.19, 1.46) | 5.2E−08 | 0.985 |
| 2 | rs2352551 | 204503002 | C < T | T | 0.51 | 1.32 | (1.19, 1.46) | 5.2E−08 | 0.986 |
| 2 | rs11571309 | 204501584 | G < T | G | 0.49 | 1.32 | (1.19, 1.46) | 5.6E−08 | 0.985 |
| 2 | rs3096863 | 204500977 | C < G | C | 0.33 | 1.33 | (1.2, 1.48) | 6.2E−08 | 0.994 |
| 2 | rs3096859 | 204490820 | C < T | C | 0.33 | 1.33 | (1.2, 1.48) | 7.2E−08 | 0.992 |
| 4 | rs7656035 | 123739679 | A < C | C | 0.65 | 1.35 | (1.22, 1.5) | 6.9E−09 | 1.000 |
| 4 | rs7682481 | 123743476 | C < G | C | 0.35 | 1.35 | (1.22, 1.5) | 6.9E−09 | 0.998 |
| 4 | rs2390351 | 123776174 | C < T | C | 0.35 | 1.35 | (1.21, 1.49) | 1.4E−08 | 0.983 |
| 4 | rs1949946 | 123219411 | C < G | G | 0.51 | 1.33 | (1.21, 1.47) | 1.5E−08 | 0.999 |
| 4 | rs17391154 | 123775643 | A < C | A | 0.35 | 1.33 | (1.2, 1.48) | 4.1E−08 | 0.988 |
| 4 | rs6853169 | 123537515 | A < T | T | 0.61 | 1.31 | (1.19, 1.45) | 1.1E−07 | 0.993 |
| 4 | rs6849146 | 123545541 | C < T | C | 0.39 | 1.31 | (1.19, 1.45) | 1.1E−07 | 0.994 |
| 4 | rs6827839 | 123558465 | A < G | A | 0.39 | 1.31 | (1.19, 1.45) | 1.1E−07 | 0.998 |
| 4 | rs1383043 | 123562066 | A < G | A | 0.39 | 1.31 | (1.19, 1.45) | 1.1E−07 | 0.999 |
| 4 | rs10212828 | 123719561 | C < T | C | 0.38 | 1.31 | (1.19, 1.45) | 1.2E−07 | 0.949 |
| 4 | rs4267747 | 123702512 | A < G | G | 0.61 | 1.31 | (1.19, 1.45) | 1.2E−07 | 0.982 |
| 4 | rs17644013 | 123269087 | A < G | G | 0.61 | 1.31 | (1.18, 1.45) | 1.6E−07 | 0.973 |
| 4 | rs7667439 | 123613261 | G < T | T | 0.61 | 1.3 | (1.18, 1.44) | 2.1E−07 | 0.997 |
| 4 | rs10032704 | 123525673 | C < T | C | 0.39 | 1.3 | (1.18, 1.44) | 2.5E−07 | 0.993 |
| 4 | rs2127511 | 123532038 | C < T | C | 0.39 | 1.3 | (1.18, 1.44) | 2.5E−07 | 0.993 |
| 4 | rs6832214 | 123300910 | C < G | G | 0.61 | 1.3 | (1.18, 1.44) | 3.0E−07 | 0.999 |
| 4 | rs4833817 | 123391694 | G < T | G | 0.39 | 1.3 | (1.17, 1.44) | 3.3E−07 | 0.999 |
| 4 | rs7673567 | 123625434 | C < T | C | 0.38 | 1.3 | (1.17, 1.43) | 3.8E−07 | 0.959 |
| 4 | rs7682281 | 123315936 | C < T | C | 0.39 | 1.29 | (1.17, 1.43) | 4.5E−07 | 0.998 |
| 6 | rs3860823 | 150398219 | C < T | C | 0.41 | 0.61 | (0.55, 0.68) | 2.3E−20 | 1.000 |
| 6 | rs12181819 | 150396358 | A < G | A | 0.41 | 0.61 | (0.55, 0.68) | 7.9E−20 | 1.000 |
| 6 | rs11155696 | 150398976 | A < G | A | 0.41 | 0.61 | (0.55, 0.68) | 7.9E−20 | 1.000 |
| 6 | rs9479481 | 150399637 | A < G | G | 0.59 | 0.61 | (0.55, 0.68) | 7.9E−20 | 1.000 |
| 6 | rs11754987 | 150392897 | A < G | A | 0.41 | 0.61 | (0.55, 0.68) | 8.6E−20 | 0.987 |
| 6 | rs13209192 | 150391792 | A < G | G | 0.59 | 0.61 | (0.55, 0.68) | 9.7E−20 | 0.978 |
| 6 | rs13198863 | 150392474 | G < T | G | 0.41 | 0.61 | (0.55, 0.68) | 1.0E−19 | 0.983 |
| 6 | rs11757186 | 150386067 | A < G | A | 0.41 | 0.62 | (0.56, 0.69) | 4.6E−19 | 0.941 |
| 6 | rs13218129 | 150383233 | C < T | T | 0.58 | 0.62 | (0.56, 0.69) | 1.0E−18 | 0.930 |
| 6 | rs9478362 | 150382219 | C < T | C | 0.41 | 0.63 | (0.57, 0.7) | 3.0E−18 | 0.925 |
| 6 | rs5017316 | 150375182 | A < T | T | 0.59 | 0.63 | (0.57, 0.7) | 3.5E−18 | 0.907 |
| 6 | rs9479405 | 150379758 | A < G | A | 0.41 | 0.63 | (0.57, 0.7) | 3.7E−18 | 0.917 |
| 6 | rs9479403 | 150379439 | C < T | C | 0.41 | 0.63 | (0.57, 0.7) | 4.4E−18 | 0.912 |
| 6 | rs9478354 | 150376059 | A < G | A | 0.41 | 0.63 | (0.57, 0.7) | 4.6E−18 | 0.908 |
| 6 | rs563278 | 150406120 | C < G | C | 0.41 | 0.63 | (0.57, 0.7) | 7.3E−18 | 0.990 |
| 6 | rs9479513 | 150409013 | G < T | T | 0.59 | 0.63 | (0.57, 0.7) | 7.3E−18 | 0.991 |
| 6 | rs2065713 | 150423333 | A < G | A | 0.41 | 1.56 | (1.41, 1.72) | 1.2E−17 | 0.984 |
| 6 | rs932744 | 150432356 | C < G | C | 0.42 | 1.54 | (1.39, 1.71) | 3.9E−17 | 0.985 |
| 6 | rs562425 | 150400892 | A < G | A | 0.44 | 0.64 | (0.58, 0.71) | 4.3E−17 | 0.778 |
| 6 | rs9371693 | 150431128 | A < G | A | 0.42 | 1.52 | (1.37, 1.68) | 5.5E−16 | 0.982 |
| 6 | rs550193 | 150435583 | C < T | T | 0.63 | 1.47 | (1.33, 1.63) | 8.7E−14 | 0.964 |
| 6 | rs912558 | 150427423 | G < T | G | 0.35 | 0.67 | (0.6, 0.75) | 7.1E−13 | 0.987 |
| 6 | rs9397137 | 150423695 | A < G | A | 0.34 | 0.68 | (0.61, 0.75) | 1.1E−12 | 0.982 |
| 6 | rs6941524 | 150423360 | G < T | G | 0.48 | 0.7 | (0.63, 0.77) | 1.9E−12 | 0.985 |
| 6 | rs4869816 | 150436219 | C < G | C | 0.38 | 1.42 | (1.28, 1.57) | 1.4E−11 | 0.964 |
| 6 | rs12202684 | 150420144 | C < T | C | 0.29 | 1.4 | (1.26, 1.56) | 3.8E−10 | 0.981 |
| 6 | rs11756904 | 150452593 | C < T | C | 0.34 | 0.71 | (0.64, 0.79) | 6.8E−10 | 0.995 |
| 6 | rs11754434 | 150452678 | C < T | T | 0.66 | 0.71 | (0.64, 0.79) | 6.8E−10 | 0.997 |
| 6 | rs11756945 | 150452795 | C < T | C | 0.34 | 0.71 | (0.64, 0.79) | 6.8E−10 | 0.998 |
| 6 | rs13216978 | 150453260 | C < T | T | 0.66 | 0.71 | (0.64, 0.79) | 6.8E−10 | 0.945 |
| 6 | rs789825 | 150450639 | A < G | A | 0.34 | 0.71 | (0.64, 0.79) | 7.6E−10 | 0.993 |
| 6 | rs11755079 | 150453451 | A < G | A | 0.35 | 0.71 | (0.64, 0.8) | 8.6E−10 | 0.898 |
| 6 | rs12192777 | 150413828 | C < T | T | 0.70 | 1.39 | (1.25, 1.54) | 1.1E−09 | 0.968 |
| 6 | rs11155698 | 150408547 | C < T | C | 0.26 | 1.39 | (1.25, 1.55) | 1.9E−09 | 0.914 |
| 6 | rs9384068 | 150402575 | A < G | A | 0.28 | 1.38 | (1.24, 1.53) | 4.9E−09 | 0.978 |
| 6 | rs11155699 | 150409590 | C < T | C | 0.28 | 1.38 | (1.24, 1.53) | 4.9E−09 | 0.995 |
| 6 | rs12213731 | 150410455 | A < C | A | 0.28 | 1.37 | (1.23, 1.53) | 6.7E−09 | 1.000 |
| 6 | rs789824 | 150450765 | A < C | A | 0.35 | 0.73 | (0.66, 0.81) | 7.0E−09 | 0.967 |
| 6 | rs6907188 | 150387730 | A < G | A | 0.45 | 1.33 | (1.2, 1.47) | 2.0E−08 | 0.940 |
| 6 | rs4242284 | 150379521 | A < G | G | 0.55 | 1.33 | (1.2, 1.47) | 2.1E−08 | 0.912 |
| 6 | rs6913561 | 150381728 | A < G | A | 0.45 | 1.33 | (1.2, 1.46) | 2.5E−08 | 0.918 |
| 6 | rs639240 | 150385522 | A < C | C | 0.61 | 1.32 | (1.19, 1.46) | 5.1E−08 | 0.938 |
| 6 | rs17079170 | 150389480 | A < G | A | 0.39 | 1.31 | (1.19, 1.45) | 8.7E−08 | 0.955 |
| 6 | rs9322242 | 150447728 | C < T | C | 0.39 | 0.76 | (0.69, 0.84) | 1.9E−07 | 0.999 |
| 6 | rs7767719 | 150447842 | A < G | G | 0.61 | 0.76 | (0.69, 0.84) | 1.9E−07 | 0.998 |
| 6 | rs9322243 | 150448005 | C < G | C | 0.39 | 0.76 | (0.69, 0.84) | 1.9E−07 | 0.997 |
| 6 | rs10457079 | 150423112 | C < T | T | 0.78 | 1.34 | (1.2, 1.51) | 4.9E−07 | 0.933 |
| 9 | rs1830454 | 101757954 | A < G | A | 0.33 | 1.32 | (1.19, 1.46) | 2.2E−07 | 0.999 |
| 9 | rs7027619 | 101759549 | G < T | T | 0.67 | 1.32 | (1.19, 1.46) | 2.2E−07 | 1.000 |
| 9 | rs10121880 | 101724864 | A < G | G | 0.67 | 1.32 | (1.19, 1.46) | 2.4E−07 | 0.963 |
| 9 | rs4282626 | 101730001 | A < G | G | 0.67 | 1.32 | (1.19, 1.46) | 2.4E−07 | 0.964 |
| 9 | rs9299335 | 101731267 | A < G | G | 0.67 | 1.32 | (1.19, 1.46) | 2.4E−07 | 0.965 |
| 9 | rs10123261 | 101735263 | A < C | A | 0.33 | 1.32 | (1.19, 1.46) | 2.4E−07 | 0.968 |
| 9 | rs10120103 | 101735289 | C < T | C | 0.33 | 1.32 | (1.19, 1.46) | 2.4E−07 | 0.969 |
| 9 | rs4742778 | 101741788 | G < T | T | 0.67 | 1.32 | (1.19, 1.46) | 2.4E−07 | 0.972 |
| 9 | rs10760704 | 101748385 | A < G | G | 0.67 | 1.32 | (1.19, 1.46) | 2.4E−07 | 0.975 |
| 9 | rs7038506 | 101749953 | C < T | T | 0.67 | 1.32 | (1.19, 1.46) | 2.4E−07 | 0.978 |
| 9 | rs10217337 | 101750217 | A < G | G | 0.67 | 1.32 | (1.19, 1.46) | 2.4E−07 | 0.981 |
| 9 | rs10217692 | 101750252 | C < T | C | 0.33 | 1.32 | (1.19, 1.46) | 2.4E−07 | 0.983 |
| 9 | rs1852863 | 101752237 | A < G | A | 0.33 | 1.32 | (1.19, 1.46) | 2.4E−07 | 0.993 |
| 9 | rs1997367 | 101753579 | A < G | A | 0.33 | 1.32 | (1.19, 1.46) | 2.4E−07 | 0.997 |
| 9 | rs10512268 | 101754287 | A < G | G | 0.67 | 1.32 | (1.19, 1.46) | 2.4E−07 | 0.996 |
| 9 | rs7039716 | 101710036 | A < T | T | 0.67 | 1.32 | (1.19, 1.46) | 2.6E−07 | 0.958 |
| 9 | rs4585797 | 101713968 | C < G | G | 0.67 | 1.32 | (1.19, 1.46) | 2.6E−07 | 0.958 |
| 9 | rs2416936 | 101716860 | A < T | T | 0.67 | 1.32 | (1.19, 1.46) | 2.6E−07 | 0.959 |
| 9 | rs4742777 | 101718994 | C < T | C | 0.33 | 1.32 | (1.19, 1.46) | 2.6E−07 | 0.960 |
| 9 | rs2416937 | 101720458 | A < C | C | 0.67 | 1.32 | (1.19, 1.46) | 2.6E−07 | 0.960 |
| 9 | rs4743370 | 101721173 | G < T | T | 0.67 | 1.32 | (1.19, 1.46) | 2.6E−07 | 0.961 |
| 9 | rs2416935 | 101709378 | G < T | T | 0.67 | 1.32 | (1.19, 1.46) | 2.7E−07 | 0.877 |
| 9 | rs9556 | 101772058 | C < T | T | 0.67 | 1.32 | (1.19, 1.46) | 2.8E−07 | 0.984 |
| 9 | rs10760700 | 101721632 | A < G | G | 0.66 | 1.31 | (1.18, 1.46) | 3.1E−07 | 0.932 |
| 10 | rs3134883 | 6140731 | A < G | A | 0.30 | 1.48 | (1.33, 1.65) | 1.1E−12 | 0.998 |
| 10 | rs706778 | 6138955 | C < T | T | 0.59 | 1.38 | (1.25, 1.53) | 4.9E−10 | 0.991 |
| 10 | rs12412095 | 6153529 | A < G | G | 0.66 | 1.35 | (1.22, 1.5) | 1.7E−08 | 0.937 |
| 10 | rs10795791 | 6148346 | A < G | G | 0.58 | 1.3 | (1.18, 1.44) | 3.3E−07 | 1.000 |
| 11 | rs574087 | 63859524 | A < G | G | 0.63 | 0.75 | (0.67, 0.83) | 8.4E−08 | 0.970 |
| 11 | rs499425 | 63862505 | A < G | A | 0.35 | 0.75 | (0.67, 0.83) | 1.6E−07 | 0.980 |
| 11 | rs671976 | 63802605 | A < G | G | 0.51 | 1.3 | (1.18, 1.44) | 1.9E−07 | 0.991 |
| 11 | rs1199046 | 63874702 | C < T | T | 0.65 | 0.76 | (0.68, 0.84) | 3.7E−07 | 0.957 |
| 11 | rs663743 | 63864311 | A < G | A | 0.31 | 0.75 | (0.67, 0.84) | 4.1E−07 | 0.936 |
| 12 | rs877636 | 54766850 | A < G | G | 0.66 | 1.35 | (1.22, 1.49) | 1.3E−08 | 0.940 |
| 12 | rs705702 | 54676903 | A < G | G | 0.66 | 1.34 | (1.21, 1.49) | 1.5E−08 | 0.975 |
| 12 | rs2292239 | 54768447 | G < T | T | 0.66 | 1.34 | (1.21, 1.49) | 1.6E−08 | 0.941 |
| 12 | rs2456973 | 54703195 | A < C | C | 0.65 | 1.34 | (1.21, 1.48) | 1.7E−08 | 0.998 |
| 12 | rs705704 | 54721679 | A < G | A | 0.35 | 1.34 | (1.21, 1.48) | 1.7E−08 | 0.993 |
| 12 | rs772921 | 54689844 | C < T | T | 0.65 | 1.34 | (1.21, 1.48) | 1.8E−08 | 0.998 |
| 12 | rs11171739 | 54756892 | C < T | C | 0.42 | 1.33 | (1.2, 1.47) | 2.7E−08 | 0.942 |
| 12 | rs705698 | 54670954 | C < T | C | 0.34 | 1.33 | (1.2, 1.47) | 5.2E−08 | 0.976 |
| 12 | rs2271194 | 54763961 | A < T | A | 0.42 | 1.32 | (1.19, 1.46) | 5.9E−08 | 0.939 |
| 12 | rs773108 | 54656178 | A < G | G | 0.66 | 1.33 | (1.2, 1.47) | 6.2E−08 | 0.992 |
| 12 | rs773109 | 54660962 | A < G | A | 0.34 | 1.33 | (1.2, 1.47) | 6.5E−08 | 0.986 |
| 12 | rs705699 | 54671071 | A < G | A | 0.42 | 1.3 | (1.18, 1.44) | 1.8E−07 | 0.977 |
| 12 | rs2271189 | 54781258 | A < G | A | 0.42 | 1.31 | (1.18, 1.45) | 2.1E−07 | 0.991 |
| 12 | rs773114 | 54665327 | A < T | T | 0.58 | 1.3 | (1.17, 1.43) | 3.4E−07 | 0.979 |
| 12 | rs1873914 | 54665694 | C < G | C | 0.42 | 1.29 | (1.17, 1.43) | 3.7E−07 | 0.978 |
| 18 | rs888270 | 12764894 | A < G | A | 0.18 | 1.39 | (1.22, 1.57) | 3.4E−07 | 0.842 |

[0413] Reducing Redundancy in Association Evidence.

[0414] When several SNPs that are clustered together within the genome are all significantly associated with a trait, such as is depicted in FIG. 5A, there are two alternative explanations. First, linkage disequilibrium (LD) between the alleles accounts for the association of each SNP with the trait (FIG. 5B). In such a scenario, SNPs reside on a single haplotype which is inherited together, and conditioning on any one of the clustered SNPs will remove evidence of association for the other SNPs, so that the effect estimate of SNP₂ conditioned on SNP, will show no association (OR=1). (FIG. 5B). Alternatively, the effects of the SNPs may be independent, residing on distinct haplotypes which are inherited independently. In this case, conditioning on one SNP will not change the effect estimate of the other SNPs (FIG. 5C). In traditional risk factor epidemiology, these two models are distinguished by confounding analysis. Specifically, either stratified analysis or conditional regression is employed to determine if conditioning on one exposure variable reduces the magnitude of the effect estimate for the second exposure variable.

[0415] For the analysis, SAS was used to perform logisitic regression to obtain crude effect estimates for each of the significantly associated SNPs within a given genomic region. For each SNP, we compared this estimate to an adjusted estimate, obtained by entering a second SNP as a covariate. For all regions outside of the HLA, either adjustment did not alter the crude estimate and the SNPs were inferred to be on distinct haplotypes, or adjustment resulted in a null effect estimate (OR=1) and we inferred that the SNPs reside on a common haplotype. Within the HLA, adjustment sometimes altered the effect estimate, though not to the null value. Therefore for analysis of the HLA region, a 10% threshold was used. If the adjusted effect estimate differed from the crude estimate by more than 10%, we concluded the presence of shared haplotypes. The results of these analyses are summarized in Table 3 by an indication of risk haplotype.

[0416] Protein and mRNA Distribution of Hair Follicle Related Genes.

[0417] Genes that showed statistically significant evidence for association with AA were assessed for expression in the hair follicle and immune system. To determine expression in immune tissues, whole blood cell was subject to PCR. Primers used are listed in Table 9.

[0418] Integrating GWAS Results with Previous Genetic Studies in AA.

[0419] Prior to this GWAS, we had performed linkage analysis in a cohort of 28 AA families.^{S19} Our GWAS evidence overlaps with linkage at the loci on 6p, 6q and 10p. A comparison of our GWAS results to the previously published linkage studies in the C3H-HeJ mouse model for alopecia areata revealed overlap only within the HLA Class II region.^{S20}

[0420] We did not find statistically significant evidence for some of the other candidate genes previously reported for AA, such as AIRE or PTPN22. In Table 6, we summarize published candidate gene studies in AA (obtained from the Human Genetic Epidemiology Navigator; www.HuGEnavigator.net) and compare findings in this study.

[0421] Table 6 shows the investigated gene, study conclusion, the number of published studies, and the minimum p-value obtained in our GWAS. Outside of the HLA, none of the genes exceeded the significance threshold in our study, although some may reach significance as our sample size is increased or the GWAS is replicated in other populations.

[0422] Peroxiredoxin (PRDX) Gene Family in Autoimmunity.

[0423] The mitochondrial respiration and general metabolic activity of cells constantly produce reactive oxygen species which can further oxidize the organelle membranes, proteins or DNA and render them unstable or inactive. There is protective redox enzymatic machinery in cells which reduces these ROS species into harmless byproducts using antioxidants such as glutathione, thioredoxins and others. PRDXs are a family of such enzymes that contain a redox-active cystine residue in their active site which converts H₂O₂ or alkyl peroxides into harmless byproducts^{P25}. Overexpression of PRDX5 protects the cell against DNA damage and apoptosis when subjected to high concentrations of oxidative stress^{P26,P27}.

[0424] Chronic upregulation of PRDX5 can ultimately lead to the survival of aberrant cells which harbor danger signals and can present damaged self antigens to the immune system. This can lead to development of autoimmunity. PRDXs themselves can undergo hyperoxidation-induced structural modifications in stressed tissue^{P28}. Autoantibodies against PRDX1, PRDX2, and PRDX4 have observed in a variety of autoimmune disorders^{P29-P31}, as summarized in Table 7.

TABLE 7
Autoimmune diseases with evidence for PRDX autoantigens.

| | Peroxiredoxin Family |
|---|---|
| Disease | Member |
| Systemic sclerosis | PRDX1³⁰ |
| Rheumatoid arthritis | PRDX1, PRDX4³¹ |
| Systemic lupus erythematosus | PRDX1, PRDX4³¹ |
| Psoriasis | PRDX2²⁹ |
| Crohn's disease | AphC (PRDX5)³² |

[0425] In Crohn's disease, antibodies were found to AphC (a bacterial homolog of PRDX5)^{P32}. Furthermore, it has recently been demonstrated that PRDX4 is upregulated in synovial tissue of rheumatoid arthritis patients^{P33} and that upregulation is associated with more severe tissue damage in patients with celiac disease^{P34}. It is noteworthy that the mouse homologs of PRDX1 and PRDX2 are located centrally within a region of linkage in the C3H/HeJ mouse model of AA (Alaa3 locus on mouse chromosome 8)^{P35}. PRDX5 levels are elevated in the astrocytes in the multiple sclerosis lesions and in the cartilage tissue in osteoarthritis^{P36,P37}. Interestingly, an alternatively spliced form of PRDX5 has been described which is processed by antigen presentation machinery and can activate the immune system^{P38}.

[0426] Aligning the Genetic Architecture of AA with Other Autoimmune Diseases.

[0427] CTLA4 plays a role in susceptibility to Graves' disease and Hashimoto's thyroiditis, and interestingly, the frequency of autoimmune thyroid disease has been reported to be significantly higher in AA patients than in healthy controls (25.7% vs. 3.3%; p<0.05).^{S21} In our cohort of AA patients, thyroid disease is found among 16% (Table 8).

TABLE 8
Distribution of autoimmune comorbidities in AA cohort.

| Disease | proband | |
|---|---|---|
| Hay fever/allergic rhinitis | 401 | 37% |
| Allergies | 386 | 35% |
| Atopic Dermatitis/Eczema | 314 | 29% |
| Other Allergies | 275 | 25% |
| Asthma | 205 | 19% |
| Goiter, Graves Disease, Hashimoto's Thyroiditis, | 181 | 17% |
| Hyperthyroidism, Hypothyroidism | | |
| Myxedema; Other Thyroid Disease, Thyroid Disease | | |
| Allergy shots | 144 | 13% |
| Urticaria/Angioedema | 123 | 11% |
| Other Type of Arthritis | 88 | 8% |
| Crohn's disease, Inflammatory bowel disease, | 68 | 6% |
| Irritable bowel syndrome, Ulcerative Colitis | | |
| Arthritis | 58 | 5% |
| Vitilgo | 47 | 4% |
| Psoriasis | 45 | 4% |
| Clinical Depression | 26 | 2% |
| Raynaud's Syndrome | 22 | 2% |
| Diabetes, Insulin Dependent Diabetes Mellitus, | 21 | 2% |
| Non-Insulin Dependent Diabetes Mellitus, Other, Unknown | | |
| Rheumatoid Arthritis | 20 | 2% |
| Fibromyalgia - Fibromyositis | 20 | 2% |
| ADHD | 19 | 2% |
| Hypoparathyroidism | 17 | 2% |
| Glomerulonephritis, IgA nephropathy, Kidney | 14 | 1% |
| Disease Nephrosis, Nephrotic | | |
| syndrome; Other Kidney Disease | | |
| Lichen Planus | 11 | 1% |
| Juvenile Arthritis | 7 | 1% |
| Neurological Disease | 7 | 1% |
| Rheumatic fever | 6 | 1% |
| Autoimmune hemolytic anemia | 6 | 1% |
| Idiopathic thrombocytic purpura | 6 | 1% |
| Systemic Lupus Erythematosus | 5 | 0% |
| Hyperparathyroidism | 5 | 0% |
| Pernicious Anemia | 4 | 0% |
| Cardiomyopathy | 4 | 0% |
| Sjogren's Syndrome | 4 | 0% |
| Collagen vascular disease | 4 | 0% |
| Myasthenia Gravis | 3 | 0% |
| Vasculitis | 3 | 0% |
| Autoimmune Polyendocrinopathy | 3 | 0% |
| Candidiasis-ectodermal dystrophy | | |
| Dermatitis herpetiformis | 3 | 0% |
| Chronic Inflammatory Demyelinating Polyneuropathy | 3 | 0% |
| Bipolar Disease | 2 | 0% |
| Sarcoidosis | 2 | 0% |
| Celiac disease/sprue | 2 | 0% |
| Autoimmune hepatitis | 2 | 0% |
| Uveitis | 2 | 0% |
| Bullous Pemphigoid | 2 | 0% |
| Stiff-man Syndrome | 2 | 0% |
| Autoimmune blistering disease | 2 | 0% |
| Polychondritis | 2 | 0% |
| Multiple Sclerosis | 1 | 0% |
| Polymyalgia Rheumatica | 1 | 0% |
| Spondyloarthritis | 1 | 0% |
| Addison's disease | 1 | 0% |
| CREST Syndrome | 1 | 0% |
| Antiphospholipid Syndrome | 1 | 0% |
| Polymyostis/Dermatomyositis | 1 | 0% |
| Polyarteritis Nodosa | 1 | 0% |
| Sclerodema | | 0% |
| Guillain-Barré syndrome | | 0% |
| Ankylosing spondylitis | | 0% |
| Takayasu Arteritis | | 0% |
| Reiter's Syndrome | | 0% |
| Pemphigus vulgaris | | 0% |
| Churg-Strass syndrome | | 0% |
| Essential Mixed Cryoglobulinemia | | 0% |
| Waardenburg syndrome | | 0% |

[0428] In contrast, psoriasis consistently demonstrates strong association to the HLA class I locus, suggesting some fundamental disease mechanisms differ between AA and psoriasis, despite the fact that both affect the skin. Among the most noteworthy correlations include 28% of AA patients also have atopic dermatitis and 16% have thyroiditis, whereas psoriasis and vitiligo are each found in only 4% of our cohort of AA patients (Table 8).

[0429] Therapies against several of the genes identified in our GWAS are already in clinical use for some of these disorders. Specifically, CTLA4 blockade by abatacept is used in the treatment of RA, and IL-2R has been targeted using daclizumab in patients with MS.^{S22} Likewise, therapeutics for the other two genes from our GWAS are being developed and have been tested successfully in animals, in particular, an anti-IL-21R fusion protein (IL-21R-Fc) in mouse models of RA and SLE, as well as an anti-NKG2D MAb in the NOD mouse model of T1D in which ULBP ligands are expressed in the pancreatic islets.^{S23} Such modalities may represent viable opportunities for clinical trials in AA patients in the near future.

[0430] ULBP mRNA Expression.

[0431] The expression of ULBP genes is examined in a variety of cell types, using RNA from normal human keratinocytes (NHKs), human thymus, human scalp, human plucked hair follicle (HF), and freshly dissected dermal papilla (DP). ULBP3 and ULBP4 were strongly expressed in NHKs, thymus, scalp, and HF, whereas ULBP6 was expressed in NHKs, scalp and HF, and ULBP2 and ULBP5 were expressed only in NHKs and thymus.

### REFERENCES

[0432] S1. Duvic, M., Norris, D., Christiano, A., Hordinsky, M. & Price, V. Alopecia areata registry: an overview. J Investig Dermatol Symp Proc 8, 219-21 (2003).
[0433] S2. Mitchell, M. K., Gregersen, P. K., Johnson, S., Parsons, R. & Vlahov, D. The New York Cancer Project: rationale, organization, design, and baseline characteristics. J Urban Health 81, 301-10 (2004).
[0434] S3. Plenge, R. M. et al. TRAF1-C5 as a risk locus for rheumatoid arthritis—a genomewide study. N Engl J Med 357, 1199-209 (2007).
[0435] S4. Hunter, D. J. et al. A genome-wide association study identifies alleles in FGFR2 associated with risk of sporadic postmenopausal breast cancer. Nat Genet. 39, 870-4 (2007).
[0436] S5. Yeager, M. et al. Genome-wide association study of prostate cancer identifies a second risk locus at 8q24. Nat Genet. 39, 645-9 (2007).
[0437] S6. Tworoger, S. S., Eliassen, A. H., Sluss, P. & Hankinson, S. E. A prospective study of plasma prolactin concentrations and risk of premenopausal and postmenopausal breast cancer. J Clin Oncol 25, 1482-8 (2007).
[0438] S7. Gunderson, K. L. et al. Whole-genome genotyping. Methods Enzymol 410, 359-76 (2006).
[0439] S8. Gunderson, K. L. et al. Whole-genome genotyping of haplotype tag single nucleotide polymorphisms. Pharmacogenomics 7, 641-8 (2006).
[0440] S9. Steemers, F. J. et al. Whole-genome genotyping with the single-base extension assay. Nat Methods 3, 31-3 (2006).
[0441] S10. Hakonarson, H. et al. A novel susceptibility locus for type I diabetes on Chr12q13 identified by a genome-wide association study. Diabetes 57, 1143-6 (2008).
[0442] S11. WTCCC. Genome-wide association study of 14,000 cases of seven common diseases and 3,000 shared controls. Nature 447, 661-678 (2007).
[0443] S12. Julia, A. et al. Genome-wide association study of rheumatoid arthritis in the Spanish population: KLF12 as a risk locus for rheumatoid arthritis susceptibility. Arthritis Rheum 58, 2275-86 (2008).
[0444] S13. Gregersen, P. K. et al. REL, encoding a member of the NF-kappaB family of transcription factors, is a newly defined risk locus for rheumatoid arthritis. Nat Genet 41, 820-3 (2009).
[0445] S14. Steer, S. et al. Genomic DNA pooling for whole-genome association scans in complex disease: empirical demonstration of efficacy in rheumatoid arthritis. Genes Immun 8, 57-68 (2007).
[0446] S15. Horn, G. et al. Association of Systemic Lupus Erythematosus with C8orf13-BLK and ITGAM-ITGAX. N Engl J Med (2008).
[0447] S16. Harley, J. B. et al. Genome-wide association scan in women with systemic lupus erythematosus identifies susceptibility variants in ITGAM, PXK, KIAA1542 and other loci. Nat Genet. 40, 204-10 (2008).
[0448] S17. van Heel, D. A. et al. A genome-wide association study for celiac disease identifies risk variants in the region harboring IL2 and IL21. Nat Genet. 39, 827-9 (2007).
[0449] S18. Hirschfield, G. M. et al. Primary biliary cirrhosis associated with HLA, IL12A, and IL12RB2 variants. N Engl J Med 360, 2544-55 (2009).
[0450] S19. Martinez-Mir A, Zlotogorski A, Gordon D, et al. Genomewide scan for linkage reveals evidence of several susceptibility loci for alopecia areata. Am J Hum Genet. 2007; 80:316-28.
[0451] S20. Sundberg J P, Silva K A, Li R, Cox G A, King L E. Adult-onset Alopecia areata is a complex polygenic trait in the C3H/HeJ mouse model. The Journal of investigative dermatology 2004; 123:294-7.
[0452] S21. Kasumagic-Halilovic E. Thyroid autoimmunity in patients with alopecia areata. Acta Dermatovenerol Croat 2008; 16:123-5.
[0453] S22. Bielekova B, Howard T, Packer A N, et al. Effect of anti-CD25 antibody daclizumab in the inhibition of inflammation and stabilization of disease progression in multiple sclerosis. Arch Neurol 2009; 66:483-9.
[0454] S23. Ettinger R, Kuchen S, Lipsky P E. Interleukin 21 as a target of intervention in autoimmune disease. Ann Rheum Dis 2008; 67 Suppl 3:iii83-6.
[0455] P24. Gilhar, A., Paus, R. & Kalish, R. S. Lymphocytes, neuropeptides, and genes involved in alopecia areata. J Clin Invest 117, 2019-27 (2007).
[0456] P25. Wood, Z. A., Schroder, E., Robin Harris, J. & Poole, L. B. Structure, mechanism and regulation of peroxiredoxins. Trends Biochem Sci 28, 32-40 (2003).
[0457] P26. Banmeyer, I. et al. Overexpression of human peroxiredoxin 5 in subcellular compartments of Chinese hamster ovary cells: effects on cytotoxicity and DNA damage caused by peroxides. Free Radic Biol Med 36, 65-77 (2004).
[0458] P27. Zhou, Y. et al. Mouse peroxiredoxin V is a thioredoxin peroxidase that inhibits p53-induced apoptosis. Biochem Biophys Res Commun 268, 921-7 (2000).
[0459] P28. Schroder, E., Brennan, J. P. & Eaton, P. Am J Physiol Heart Circ Physiol 295, H425-33 (2008).
[0460] P29. Besgen, P., Trommler, P., Vollmer, S. & Prinz, J. C. Ezrin, maspin, peroxiredoxin 2, and heat shock protein 27: potential targets of a streptococcal-induced autoimmune response in psoriasis. J Immunol 184, 5392-402.
[0461] P30. Iwata, Y. et al. Rheumatology 46, 790-795 (2007).
[0462] P31. Karasawa, R., Ozaki, S., Nishioka, K. & Kato, T. Autoantibodies to peroxiredoxin I and IV in patients with systemic autoimmune diseases. Microbiol. Immunol 49, 57-65 (2005).
[0463] P32. Olsen, I., Wiker, H. G., Johnson, E., Langeggen, H. & Reitan, L. J. Elevated antibody responses in patients with Crohn's disease against a 14-kDa secreted protein purified from Mycobacterium avium subsp. paratuberculosis. Scand J Immunol 53, 198-203 (2001).
[0464] P33. Chang, X. T. et al. Identification of Proteins with Increased Expression in Rheumatoid Arthritis Synovial Tissues. Journal of Rheumatology 36, 872-880 (2009).
[0465] P34. Simula, M. P. et al. PPAR signaling, pathway and cancer-related proteins are involved in celiac disease-associated tissue damage. Mol Med 16, 199-209.
[0466] P35. Sundberg, J. P., Silva, K. A., Li, R. H., Cox, G. A. & King, L. E. Adult-onset alopecia areata is a complex polygenic trait in the C3H/HeJ mouse model. Journal of Investigative Dermatology 123, 294-297 (2004).
[0467] P36. Holley, J. E., et al., Peroxiredoxin V in multiple sclerosis lesions: predominant expression by astrocytes. Mult Scler 13, 955-61 (2007).
[0468] P37. Wang, M. X. et al. Expression and regulation of peroxiredoxin 5 in human osteoarthritis. FEBS Lett 531, 359-62 (2002).
[0469] P38. Sensi, M. et al. Peptides with dual binding specificity for HLA-A2 and HLA-E are encoded by alternatively spliced isoforms of the antioxidant enzyme peroxiredoxin 5. Int Immunol 21, 257-68 (2009).

### Example 3

### Expression of ULBP3 in Hair Follicle Dermal Sheath in Active AA Lesions

[0470] The distribution of ULBP3 protein was examined within the hair follicle of unaffected scalp (FIG. 4B) and in the hair follicles of AA patients (FIG. 4C). Whereas ULBP is expressed at low levels with the hair follicle dermal papilla in normal hair follicles (FIGS. 4A-B), strikingly, in two different patients with early active AA lesions, marked upregulation of ULBP3 expression was observed in the dermal sheath as well as the dermal papilla (FIGS. 4B-C). A massive inflammatory cell infiltrate within the dermal sheath characterized by CD8+CD3+ T cells (FIGS. 4G-L) was noted, but only rare NK cells. Finally, double-immunostainings with an anti-CD8 and an anti-NKG2D antibodies revealed that most CD8+ T cells co-expressed NKG2D (FIGS. 4M-O). These results suggest that the autoimmune attack in AA region is mediated by CD8+NKG2D+ cytotoxic T cells of which infiltration may be induced by upregulation of the NKG2D ligand ULBP3 in the dermal sheath of the HF.

### Example 4

### Danger Signals in the Hair Follicle

[0471] We will test whether the origin of autoimmunity in Alopecia Areata (AA) resides in the hair follicle itself. We will focus on defining putative danger signals in the hair follicle that contribute to the pathogenesis of AA. We have selected two candidate genes identified in our recent GWAS study, implicated eight genomic regions involved in AA. Using a battery of in vivo and in vitro approaches, in both human tissue and mouse models, we will systematically define the role of ULBP3/6 and PRDX5 in the hair follicle. This will provide new insights into both the role of PRDX5 and ULBP3/6 genes in AA pathogenesis, as well as modeling the disease in transgenic animals. We will also identify pathogenic alleles that reside within the MHC, which may contribute to immune dysregulation driving the pathogenesis of AA.

[0472] We will perform high resolution HLA typing of the DR and DQ loci. Furthermore, we will use integrative analytic methods to identify putative danger signals emitted by the HF.

[0473] AA Susceptibility Genes in the Hair Follicle.

[0474] GWAS identify disease alleles that are both associated with disease and exist at sufficient frequencies to be adequately captured by tagSNPs. Immune response genes are vulnerable to positive selection, which increases allele frequencies, thus making this class of genes amenable to detection with GWAS (FIG. 8 upper arrow). While the genetic architecture of AA will be composed of immune genes and hair genes, without being bound by theory, SNPs that exceed statistical significance will largely map to immune genes and hair genes will generally only achieve nominal significance.

[0475] In order to mine this ‘gray zone’ of significance (5×10⁻⁷>p>0.01) for hair genes (FIG. 8 lower arrow), we mapped the top 5000 SNPs to a set of 3347 genes. Next, we cross-referenced this gene list with our database of hair follicle genes, which contains 4166 genes that have been implicated in one or more hair follicle gene expression experiments, thus identifying a set of 476 genes. Of these, 5 genes contained SNPs that exceeded statistical significance in the GWAS (p<5×10⁻⁷; PPP1R14C, CREBL1, SUOX, CDK2, STX17). The vast majority of hair genes (471) contained SNPs in the gray zone of significance.

[0476] Without being bound by theory, if the distribution of p-values for hair genes are largely driven by low allele frequencies, then results from a method that is suited for detection of rare variants, e.g. linkage, can converge with this “high-hanging fruit” from our GWAS. We therefore cross-referenced the 471 GWAS genes with results from our linkage analyses, and 121 genes fell into regions with at least suggestive evidence for linkage (1<LOD<4). We show results for chromosome 12 (FIG. 9). This indicates that there are biologically relevant hair follicle genes nested within our nominally signficant findings. Next, in order to further characterize these target organ genes, we annotated the list of 476 genes with GO terms and the most significantly represented GO terms related to biological processes involving cell adhesion, motion/locomotion/migration, proliferation and morphogenesis (Table 14).

TABLE 14
Significantly represented GO terms related to biological processes.

| Term | Count (%) | PValue | Genes |
|---|---|---|---|
| cell adhesion | 63 (14%) | 1.14E−14 | CLSTN2, MEGF10, DDR2, SDC3, NRCAM, APP, DAB1, ROBO2, ESAM, COL11A1, |
| (GO: 0007155) | | | PTPRK, PTPRM, PDPN, NRXN3, ACTN1, PTPRU, NRXN1, CD164, CTNNA2, NCAM1, |
| | | | CD36, CNTN1, JAM2, PARVA, PLXNC1, CCR1, TNC, COL3A1, PTK7, CTNND2, |
| | | | SPOCK1, CX3CL1, CDH4, CDH5, ALCAM, CDH8, CD9, ITGB8, COL27A1, PVRL3, |
| | | | BCL2, TEK, SCARB1, THBS1, THBS4, DPT, FLRT3, COL18A1, PTPRC, COL13A1, |
| | | | PCDH10, PCDH17, COL5A1, PCDH18, LAMA2, CDH13, VWF, COL19A1, PKP1, |
| | | | PKP4, PERP, CDH10, CDH11 |
| cell motion | 47 (10%) | 1.94E−12 | CAV2, EDN3, NDN, FUT8, PLXNA2, EDN2, SPOCK1, CX3CL1, TPM1, CDH4, TGFB2, |
| (GO: 0006928) | | | ALCAM, NRCAM, CTTNBP2, CD9, APP, DAB1, DNER, LHX2, PAK4, ROBO2, LHX6, |
| | | | SCARB1, STRBP, SEMA3A, THBS1, RUNX3, DCLK1, THBS4, PTPRK, KLF7, PTPRM, |
| | | | EGR2, NRXN3, ARID5B, OTX2, NR4A2, IGF1, NRXN1, COL5A1, CTNNA2, LSP1, |
| | | | VEGFC, CDH13, EPHA7, ETS1, LRP6 |
| regulation of cell | 61 (13%) | 2.03E−11 | EDN3, E2F3, EDN2, MITF, JAG2, PRRX2, DDR2, TGFB2, CTTNBP2, CASP3, |
| proliferation | | | SERPINE1, PDGFC, ASPH, NRG1, PTPRK, PTPRM, CTBP2, RXRA, CDK6, PTPRU, |
| (GO: 0042127) | | | CD164, CDK2, VEGFC, CTH, HIPK2, VEGFA SCIN, ADAMTS1, SMARCA2, VIP, CAV2, |
| | | | NDN, TAC1, CDH5, MSX2, CD9, BCL2, TEK, CAMK2D, AXIN2, THBS1, RUNX2, |
| | | | RUNX3, DPT, COL18A1, BMP4, PTPRC, BMP2, TBX3, TGFBR2, CD276, SMAD3, |
| | | | IGF1, FOXP1, CDH13, PLA2G4A, NOTCH1, ETS1, SP6, ID4, KLF4 |
| cellular component | 37 (8%) | 3.41E−09 | NDN, PTK7, PIP5K1C, TPM1, CDH4, TGFB2, NRCAM, ALCAM, CD9, APP, DAB2, |
| morphogenesis | | | SLC1A3, LHX2, BCL2, ROBO2, SEMA3A, RUNX3, DCLK1, COL18A1, KLF7, BMP2, |
| (GO: 0032989) | | | PTPRM, EGR2, PDPN, RYK, NRXN3, RXRA MAP1B, OTX2, NR4A2, NRXN1, GAS7, |
| | | | CTNNA2, TNNT2, SS18, EPHA7, NOTCH1 |
| regulation of locomotion | 23 (5%) | 7.52E−08 | COL18A1, PTPRK, EDN3, PLD1, PTPRM, PDPN, EDN2, SNCA, JAG2, SMAD3, TAC1, |
| (GO: 0040012) | | | IGF1, PTPRU, TPM1, TGFB2, LAMA2, CDH13, VEGFC, BCL2, TEK, VEGFA, SCARB1, |
| | | | THBS1 |

[0477] We also find 62 genes involved with the regulation of apoptosis or cell death among hair follicle genes with nominal significance in our GWAS. This is noteworthy because the Danger Model of Autoimmunity, which maintains that the primary goal of the immune system is not to distinguish between self and nonself, but rather to distinguish between dangerous and harmless signals, predicts the presence of signals released by cells undergoing abnormal cell death, or normal cell death that has gone awry. Without being bound by theory, such a danger signal is can be an initiating event in autoimmunity.

[0478] High Resolution HLA Typing

[0479] We previously performed high resolution typing (LABType SSO Typing Test from One Lambda, Inc) to genotype a small subset of patients with severe disease (AU) from our GWAS cohort at the DRB1 locus (FIG. 10). We have extended this work by typing this same set of 60 AU patients at the DQB1 and DQA1 locus, allowing us to determine genotypes and serotype groups. HLA class II molecules DQ8 and DQ2 have been identified as key genetic risk factors in T1D and CeD. While DQ8 conveys a higher risk for T1D, DQ2 is more frequent in CD. In our cohort of 60 patients, 43% carried at least one of these risk factors, with 15 patients carrying DQ8 alleles and 13 DQ2. For the HLA-DRB1 locus, allele DRB1*0301 is the only one associated with risk for T1D, CeD and Addison's Disease. In our cohort, this was the most frequent DRB1 allele, present in 36 of our patients (60%). Interestingly, we also observed that patients who carry this risk allele tend to carry a greater genetic liability. In our GWAS, the total number of risk alleles carried by an individual varied significantly between cases and controls. Here, we observe that AU patients who carry DQB1*0301 carry and average of 15 risk alleles across their genomes, while those without this HLA allele, carry an average of 13 risk alleles. Finally, we found four patients that carry the HLA haplotype associated with risk for polymyositis (HLA-DRB1*03-DQA1*05-DQB1*02).

[0480] CNVs in AA

[0481] We previously scanned the eight regions of statistically significant association from our GWAS in a cohort of unaffected individuals across to catalogue DNA copy number variations (CNVs), and detected variations in STX17, IL2RA and numerous HLA genes. Here, we report our recent results obtained by utilizing a bioinformatic approach that leverages the fact that most common CNVs are well tagged by SNPs found on commercial genotyping arrays. Recently, 3432 polymorphic CNVs have been directlyt yped in a cohort of 19,000 individuals, which had been previously genotyped with commercial SNP arrays. By integrating these two datasets, each CNV was annotated with the best tagSNP from each of several sources (HapMap, Affymetrix, Illumina). We cross-referenced the list of Illumina SNPs with the results of our GWAS and identified three SNPs with evidence for a statistically significant association to AA and correlation to a common CNV (Table 15). We are validating this finding in our cohort of patients.

TABLE 15
AA associated SNPs correlated to a CNV.

| | | AA GWAS | | | StartCoord | EndCoord | |
|---|---|---|---|---|---|---|---|
| CNV | tagSNP | pvalue | CNV allele | Chr | (bp) | (bp) | Size |
| CNVR2843 | rs389884 | 4.97E−07 | CNVR2843.4 | 6 | 32,055,886 | 32,060,381 | 4,495 |
| | | | CNVR2843.2 | 6 | 32,060,426 | 32,066,895 | 6,469 |
| | | | CNVR2843.1 | 6 | 32,093,119 | 32,099,722 | 6,603 |
| | | | CNVR2843.5 | 6 | 32,099,567 | 32,124,504 | 24,937 |
| CNVR2845 | rs1063355 | 2.46E−11 | CNVR2845.27 | 6 | 32,710,664 | 32,743,652 | 32,988 |
| | | | CNVR2845.40 | 6 | 32,735,154 | 32,737,954 | 2,800 |
| CNVR3101 | rs11155699 | 4.92E−09 | CNVR3101.1 | 6 | 150,416,978 | 150,418,278 | 1,300 |

### Example 5

### Regulation of NKG2D Ligands

### The Transcriptional Regulation of NKG2D Ligands by NF-κB

[0482] Regulation of ULBP3 and ULBP6 promoters by NF-κB-inducing cytokines and by direct overexpression of NF-κB was shown, and that NF-κB p65 is required for TNF or LPS-induced NKG2DL upregulation in mouse skin was also shown. Comprehensive panels of luciferase constructs driven by 5′ and intronic promoter/enhancer regions of both human and mouse NKG2DL genes are being generated.

[0483] Previously, the analysis of NKG2DL expression in lesional biopsies consistently revealed ULBP3 and MICA upregulation in the alopecic and remission HF. Consistently, H60 and Rae1 are upregulated in the alopecic C3H/HeJ HF. However, it is important to establish that upregulation of NKG2DL at the HF precedes pathology and contributes to the etiology. Therefore, unaffected HFs from AA patients were analyzed. It is found that ULBP3 is increased at unaffected sites (FIG. 11), consistent with the idea that genetic predisposition to AA can be etiologically linked to elevation of NKG2DL that precedes disease onset. Without being bound by theory, access of NKG2D⁺CD8⁺ T cells to HF NKG2DL can be dependent on a second hit. This is completely consistent with recent animal models in which tissue restricted NKG2DL overexpression has been shown to drive antigen-independent NKG2D⁺CD8⁺ T cell responses, leading to tissue damage and induction of adaptive immune responses. It appears these responses are augmented by either tissue injury or the presence of large numbers of NKG2D⁺CD8⁺ T cells.

[0484] While ULBP3, ULBP6 and MICA were identified in the GWAS study, it is not clear whether others correlate with AA. Therefore, the analysis of ULBP expression (FIG. 12) has been expanded. MICA, ULBP2, ULBP3, and ULBP6 mRNA is increased in AA skin. MICA and ULBP3 proteins are selectively upregulated in the AA HF, while ULBP4 is highly expressed in both control and AA (FIG. 12). Quantitative PCR indicates that the increased ULBP2 expression is responsible for the pan ULBP2/5/6 staining in the AA HF.

### ULBP3 and PRDX5 Expression in Normal and AA HFs

[0485] The expression of ULBP genes implicated by the AA GWAS was examined in a variety of cell types. RNA was extracted from normal human keratinocytes (NHKs), human thymus, human scalp, human plucked HF (HF), and freshly dissected dermal papilla (DP). Expression analysis in scalp, HF and DP was performed in order to determine the particular niche of gene expression. NHKs and thymus were used as expression controls and B2M was used as a cDNA loading control. ULBP3 and was strongly expressed in NHKs, thymus, scalp, and HF. ULBP6 was found to be expressed in NHKs, scalp and HF. Neither gene member showed expression in freshly dissected DP cells (FIG. 14). This data shows a variety of expression patterns for the ULBP genes within the tissue affected by AA.

[0486] Immunofluorescence was used to localize expression of ULBP3 (FIG. 15) and PRDX5 (FIG. 16) in the HF. In normal scalp, low levels of expression of ULBP3 in the dermal papilla. PRDX5 is expressed in hair shaft and IRS of the human HF, where its expression overlaps with keratin 31 in the hair shaft cortex (HSCx). Right panels are merged images and counterstaining with DAPI is shown in blue (FIGS. 15, 16). Scale bars: 100 μm.

### NKG2D Ligand Expression in Response to Agents of Stress

[0487] The surface expression of NKG2DL is regulated at a transcriptional and post translational level. At the transcriptional level, the promoter regions contain stress response elements, as well as different putative transcription factor binding sites that influence tissue specific expression (Eagle et al. 2006). AA is associated with elevated levels of proinflammatory cytokines such as IFNg, TNFa, IL1 and IL-6 (Barahmani et al.; Ghoreishi et al.). A neurogenic stress component is also associated with AA skin with elevated expression of stress hormones such as CRH, Substance P and ACTH. (Kim et al. 2006) (Hordinsky et al. 2004). Higher levels of oxidative stress has also been identified in patients' scalp (Akar et al. 2002). Human dermal sheath (DS) cells, fibroblasts and keratinocytes were cultured in the presence of inflammatory cytokines, stress hormones and oxidative stress inducing conditions, and the transcript levels of ULBP3 and MICA were assessed. The effect of cytokine (IL-13, IL-6, IL-26) identified from the GWAS study will be further identified to determine the role of these cytokines on NKG2DL expression in the skin and the HF.

TABLE 16
Transcript Expression of MICA and ULBP3 under
conditions of stress in skin components.

| | | Hu DS Cells | | Hu fibroblasts | | Hu Keratinocytes | |
|---|---|---|---|---|---|---|---|
| | | ULBP3 | MICA | ULBP3 | MICA | ULBP3 | MICA |
| Genotoxic | UV | 1.4 | 1.1 | 1.45* | 1.96* | 1.58* | 1.2 |
| Stress | H2O2 | 0.55 | 0.95 | 0.96 | 1.25 | 1.01 | 1.27 |
| | 1 mM | | | | | | |
| | Heat | 0.91 | 0.94 | 0.68* | 1.64* | 1.63* | 2.32* |
| | Shock | | | | | | |
| Stress | CRH | 1.56 | 0.96 | 0.87 | 1.07 | 1.18 | 0.35 |
| Hormones | SP | 0.93 | 1.32 | 0.84 | 0.9 | 0.87 | 0.55 |
| | Hydrocortisone | 0.99 | 1.23 | 0.63 | 1.66 | 0.82 | 0.33 |
| Inflammatory | TNFα | 0.935 | 1.03 | 0.66 | 2.3 | 0.39 | 0.46 |
| Cytokines | IFNγ | 1.68 | 1.53 | 0.41 | 2.14 | 0.49 | 0.55 |

[0488] NKG2D recognizes MHC family proteins including the ULBP/RAET1 (UL-16 binding protein; Rae1 and H60 in mice) and MICA/MICB families of proteins. Acute upregulation of NKG2D ligands in the skin is sufficient to trigger an inflammatory response and is of particular interest in both autoimmunity and tumor immunity as ligation of NKG2D is sufficient to provide co-stimulatory signals to both conventional α/β TCR and γ/δ TCR T cells. Thus, without being bound by theory, NKG2D ligation can serve to break peripheral tolerance and/or promote adaptive responses to altered self in both physiological immunity and autoimmune disease states. As the current work concerns the etiology of AA, it is of significant interest that NKG2D on epidermal hematopoietic cells can provide a crucial signal during the response to cultured keratinocytes. Furthermore, NK cell activation correlating with upregulation of the NKG2DL, MICA, has been implicated in the breakdown of hair follicle immune privilege (HF-IP) in AA. Given the ability of NKG2D ligands to provide co-stimulatory signals to α/β T cells and to elicit pro-inflammatory and cytolytic responses, there is growing interest in the role of NKG2DL expression in the etiology of autoimmune diseases.

[0489] The NKG2D ligands are upregulated under conditions of cellular stress including DNA damage and Toll like receptor (TLR) ligation, all of which are well-known triggers of the NF-κB transcription factor family. Nevertheless, the role of NF-κB in NKG2DL expression has not been thoroughly investigated. One NKG2D ligand, MICA, has been shown to be regulated by NF-κB. For others, a more complex picture of the contribution of NF-κB has emerged. However, to date, there has been no analysis of the transcriptional regulation of the recently reported NKG2D ligand ULBP6. It was discovered that NF-κB activation can directly drive transcription from a ULBP6 promoter (FIG. 17). Furthermore, MICA, ULBP3, and ULBP6 mRNA are upregulated in the AA lesional HF (FIG. 18A). As NKGD2L are known to be regulated post-translationally as well, upregulation of ULBP3 protein was also examined by immunofluorescent microscopy, which demonstrated a more striking increase in ligand expression than was observed by quantitative PCR (QPCR) (FIG. 18B).

[0490] Owing to the important role of the NKG2DL-NKG2D axis in both anti-viral immunity and tumor immunosurveillance, understanding the transcriptional regulation of the ULBP family is of substantial interest. While there has been progress in this area, to date, there has not been an intensive investigation of the contribution of NF-κB. An important aspect is taking a targeted approach and dissecting the contribution of a single transcription factor family to the regulation of the expression of NKG2DLs. This approach will allow one to expand the investigation beyond the 5-prime 500 bp “promoter” region that has been the focus of the majority of previous efforts, to include distal and intergenic elements that are likely to also contribute substantially to the regulation of these genes.

[0491] Studies have linked activation of NF-κB to the activation of transcription from a ULBP3/6 promoter (FIG. 17), and upregulation of NKG2DL in AA skin (FIG. 18). This analysis will be expanded to additional members of the human and mouse NKG2DL family and the analysis will be extended to additional promoter and enhancer regions of the NKG2DL genes. Furthermore, the binding of the NF-κB family to relevant sites will be investigated by ChIP and contribution of NF-κB will be confirmed using DN constructs in human HF cultures and genetic approaches in mice.

### Example 6

### Expression of MICA and ULBP3

TABLE 17
Transcript expression of MICA and ULBP3 under
conditions of stress in skin components.

| | | DS Cells | | Fibroblasts | | Keratinocytes | |
|---|---|---|---|---|---|---|---|
| | | ULBP3 | MICA | ULBP3 | MICA | ULBP3 | MICA |
| Genotoxic | UV | 1.4 | 1.1 | 1.45* | 1.96* | 1.58* | 1.2 |
| Stress | Hydrogen | 0.55 | 0.95 | 0.96 | 1.25 | 1.01 | 1.27 |
| | Peroxide | | | | | | |
| | Heat Shock | 0.91 | 0.94 | 0.68* | 1.64* | 1.63* | 2.32* |
| Stress | Corticotropin | 1.56 | 0.96 | 0.87 | 1.07 | 1.18 | 0.35 |
| Hormones | Releasing | | | | | | |
| | Hormone (CRH) | | | | | | |
| | Substance P | 0.93 | 1.32 | 0.84 | 0.9 | 0.87 | 0.55 |
| | Hydrocortisone | 0.99 | 1.23 | 0.63 | 1.66 | 0.82 | 0.33 |
| Inflammatory | TNF-α | 0.93 | 1.03 | 0.66 | 2.3 | 0.39 | 0.46 |
| Cytokines | IFN-γ | 1.68 | 1.53 | 0.41 | 2.14 | 0.49 | 0.55 |

[0493] NKG2D ligands are responsive to stress stimuli and show upregulation under conditions of stress. Primary cell lines derived from skin and the hair follicle—dermal sheath cells, fibroblasts and keratinocytes were subjected to stress conditions. Genotoxic stress was induced by subjecting the cells to conditions which cause DNA damage and induce ATM/ATR response which is known to signal downstream and affect NKG2D ligand regulation. Cells were given treatment of UVB 300 j/m², hydrogen peroxide 1 mM for 3 hours and heat shock at 42° C. water bath for 1 hours followed by a 2 hr recovery period. Skin is a highly innervated organ wherein the efferent neurons produce various factors associated with the stress response canonically associated with the HPA axis. Primary cells were given 24 hr treatment with the HPA associated stress hormones—corticotropin releasing hormone, substance P and hydrocortisone. Inflammatory cytokines ae produced in the skin in response to damage and infection and are potential inducers of NKG2D ligand expression. The effect of pro-inflammatory cytokines—TNF-α and IFN-γ were assessed on the primary cell cultures.

### Example 7

### NKG2D Ligands and Receptor

### NKG2D Receptor

[0494] The presence of both activating receptors and inhibitor receptors maintain a state of equilibrium within the organism. Inhibition of NK cells occurs via MHC I by inhibitory receptors whereas activating receptors such as Ly49H and NKp46 which recognize viral associated antigens trigger the cytotoxic activity. (Bottino, Castriconi et al. 2005) Another class of activating receptors is NKG2D, a cell surface receptor present canonically on the surface of NK, NKT and γδ T-Cells. It is also present on the surface of all human and activated mouse CD8+ve T-cells (Ehrlich, Ogasawara et al. 2005). Interferon producing killer dendritic cells (Chan, Crafton et al. 2006) and a special subset of CD4+ve cells (Dai, Turtle et al. 2009) also express NKG2D on their surface. The receptor gene is coded in humans on chromosome 12 and in mice on chromosome 6 along with other members of the NKG2 natural killer cell receptor family of C-type (Ca2+) lectin like receptors (Yabe, McSherry et al. 1993) which contain NKG2-A, -B, which are splice variants and -C all of which share high degree of homology—94% in extracellular domain and 56% in transmembrane and intracellular domains whereas -D which has a very different amino acid composition and has only 21% sequence homology with others (Houchins, Yabe et al. 1991). NKG2D receptor lacks an intracellular signaling domain and requires the adaptor protein DAP10 for downstream signal transduction. It exists in a hexameric complex on the cell membrane (Wu, Song et al. 1999). High degree of homology between NKG2D receptor in humans and mice is observed and these show cross species reactivity (ULBP1 and 2) (Sutherland, Rabinovich et al. 2006).

[0495] NKG2D Ligands:

[0496] NKG2D receptor shows promiscuous binding to a variety of ligands belonging to the non classical members of the MHC superfamily with MHC class-I like α1 α2 receptor binding domains. Two classes of NKG2D are present in humans donated as MIC (A and B) and the ULBP (1-6) family and three in mice—Rae1 (α-ε){retinoic acid early inducible}, H60 {histocompatibility antigen 60} and Multi {murine ULBP-like transcript 1}. The Families differ in their structure, chromosomal position and sequence. MICA and B are transmembrane protein, have an extra α3 domain but do not associate with bta-2 microglobulin. MIC genes are present on chromosome 6 within the MHC cluster. ULBP proteins are also present on chromosome 6 but do not map to the MHC cluster. ULBP 1-3 and 6 are GPI anchored proteins whereas ULBP4 and 5 have transmembrane domain. In mice—Rae1 have GPI anchors where as Multi and 1-160 have transmembrane domains. (summarized in review) (Eagle and Trowsdale 2007)

[0497] The degree of allelic polymorphism observed in NKG2D ligands in general population is very high, and is increasingly being associated with disease and pathology. MICA is known to have more than 65 alleles which reside mostly in exon 2-4 encoding the extracellular domain of the proteins (Choy and Phipps). Similar genetic polymorphisms—different SNP frequencies and haplotypes have also been observed in the ULBP genes and are associated with different ethnic backgrounds (Afro-Caribbean, Euro-Caucasoid and Indo-Asian) (Antoun, Jobson et al.). In this study, highest polymorphism was observed in ULBP6, ULBP3 and ULBP4—which interestingly shows a skin specific expression. Similar variation in copy number of ULBP genes is also observed phylogeneticaly, with only 6 genes in humans but almost 30 in cattle (11 transcribed) (Larson, Marron et al. 2006). An NKG2D ligand like molecule Mill was also identified in the marsupial opossum, indicating early origin of NKG2D receptor-ligand interaction system. Comparative sequence analysis of the human, cattle, rat, mouse, and opossum genomes explain the high numbers of related ULBP family members through duplication and subsequent divergence events (Kondo, Maruoka et al.). Structural differences in the NKG2D ligands confer differential binding affinities as well as compartmentalization. All NKG2D ligands interact with the receptor via their α1-α2 domain and the kinetics of these interactions are determined by the amino acid sequence of the binding domain (McFarland and Strong 2003). In mice both rae 1 family and H60 compete for the receptor but H60 shows more than 25 fold higher binding affinity (O'Callaghan, Cerwenka et al. 2001). The membrane bound NKG2D ligands especially GPI anchored ULBPs tend to accumulate within lipid rafts which occur at the immune synapse between target and effector cells. MICA shows S-acylation which also confers weak raft targeting properties (Eleme, Taner et al. 2004). Polymorphisms in the cytoplasmic tail of MICA lead to differential targeting to basolateral or apical surface of epithelial cells. (Suemizu, Radosavljevic et al. 2002).

[0498] Regulation:

[0499] NKG2D ligands act as a first line of defense alerting the innate immune system of the presence of aberrant or transformed cells. Both human and murine ligands show induction after viral infections such as cytomegalovirus, HTLV-1, HIV (Wilkinson, Tomasec et al. 2008), (Azimi, Jacobson et al. 2006; Ward, Bonaparte et al. 2007). NKG2D ligands also show increased expression on tumors. Dysregulation of ULBP proteins is commonly observed in cancers such as laryngeal squamous cell carcinoma and colorectal cancer (Chen, Xu et al. 2008), (McGilvray, Eagle et al. 2009). To avert the detection of malignancy, tumors often shed extracellular domains of NKG2D ligands by proteolytic cleavage by metalloproteases or by exososomal release, which causes elevated levels of soluble ligand in the blood (Fernandez-Messina, Ashiru et al.). Interestingly several cancer studies have shown NKG2D ligands to be good prognostic markers for disease progression such as ULBP2 and ULBP4 for ovarian cancer and soluble ULBP2 for melanoma (McGilvray, Eagle et al.) (Paschen, Sucker et al. 2009). This ligand upregulation is caused due to activation of DNA Damage pathways and oncogenic pathways (Gasser, Orsulic et al. 2005; Boissel, Rea et al. 2006). Presence of NKG2D ligands on ES cells has been described and implicated in prevention of teratomas (Dressel, Schindehutte et al. 2008). Stressors which cause cellular damage such as heat shock, oxidative stress or pharmacological agents such as (proteasome inhibitors, HDAC inhibitors—trichostatin A, valproic acids and cisplatin) induce NKG2D expression as does Retinoic acid which is involved in embryonic developmental. Some of the normal tissues such as epithelial cells, neurons and embryonic tissues express NKG2D ligands constitutively. (Eagle, Jafferji et al. 2009).

[0500] The surface expression of NKG2D ligands is also regulated at a transcriptional and post translational level. At a transcriptional level the promoter regions of the ligands contain different putative transcription factor binding sites influencing differential tissue specific expression as well as regulation under stress (Eagle, Traherne et al. 2006). A number of microRNAs have also been shown to bind the 3′UTR of MIC genes and inhibit the transcript levels of the ligands (Stern-Ginossar, Gur et al. 2008). At a post translational level, normal cells which sequester the NKG2D ligands within the cell express the ligands at cellular surface in response to cellular stress (Borchers, Harris et al. 2006).

[0501] Role in Autoimmunity:

[0502] NKG2D functions to eliminate the aberrant self cells and dysregulation of this recognition process often leads to development of autoimmunity disorders (Van Belle and von Herrath 2009). In rheumatoid arthritis patients, greater numbers of circulating as well as resident CD4 positive cells express NKG2D ligand. These Helper T-cells exhibit a cytotoxic profile with secretion of IFNg, perforin, granzyme B and cytolytic ability. The synoviocytes in RA also secrete soluble MICA into the synovial fluid. (Groh, Bruhl et al. 2003). Crohn's disease patients exhibit elevated MICA staining in the lamina propria as well as a CD4 positive cells which express NKG2D receptor, secrete IFNg and perforin and are cytolytic (Allez, Tieng et al. 2007). MICA levels were found to be upregulated in active cases of celiac disease which lower with gluten free diet, along with higher soluble MICA concentrations in the patient's sera. Elevated NKG2D density was observed on intraepithelial lymphocytes of patients along with more efficient NKG2D facilitated cytotoxic response against epithelial cells (Hue, Mention et al. 2004). Non Obese diabetic mice are used as a model of type 1 diabetes in humans. A study done in these mice elucidates the importance of NKG2D receptor engagement in the development of pancreatic β-cell autoimmunity. The levels of Rae1—the murine NKG2D ligand were elevated in NOD mice compared to control balb/c mice and exhibited progressive increase with age in NOD as well as NOD SCID mice indicating that elevation of rae 1 is independent of immune response. Interestingly, NKG2D neutralizing antibody treatment in NOD mice prevented the development of T1D, underscoring the importance of NKG2D pathway in the development of autoimmunity (Ogasawara, Hamerman et al. 2004). In cases of multiple sclerosis as well elevated MICB serum levels were associated with disease relapse (Fernandez-Morera, Rodriguez-Rodero et al. 2008). Interestingly, a study also demonstrated an elevation of MICA ligand in the hair follicle of alopecia areata along with infiltration of the peribulbular tissue with NKG2D+ve CD8 and NK cells. NKG2D as well as NKG2C density were higher in NK cell of AA patients (Ito, Ito et al. 2008). The involvement of ULBP family of NKG2D ligands in the pathogenesis of the autoimmune disease—alopecia areata was shown for the first time through the GWAS Data. Allelic polymorphisms in NKG2D ligands are increasingly being associated with various autoimmune disorders. Specific MICA alleles are overrepresented in rheumatoid arthritis, inflammatory bowel disease and T1D diabetes patients implicating their role in disease pathogenesis (Kirsten, Petit-Teixeira et al. 2009), (Lopez-Hernandez, Valdes et al.) (Gambelunghe, Brozzetti et al. 2007). MICB polymorphisms are also associated with celiac disease, ulcerative colitis and multiple sclerosis (Li, Xia et al.), (Fernandez-Morera, Rodriguez-Rodero et al. 2008), (Rodriguez-Rodero, Rodrigo et al. 2006).

### REFERENCES

[0503] Allez, M., V. Tieng, et al. (2007). “CD4+NKG2D+ T cells in Crohn's disease mediate inflammatory and cytotoxic responses through MICA interactions.” Gastroenterology 132(7): 2346-58.
[0504] Antoun, A., S. Jobson, et al. “Single nucleotide polymorphism analysis of the NKG2D ligand cluster on the long arm of chromosome 6: Extensive polymorphisms and evidence of diversity between human populations.” Hum Immunol.
[0505] Azimi, N., S. Jacobson, et al. (2006). “Immunostimulation by induced expression of NKG2D and its MIC ligands in HTLV-1-associated neurologic disease.” Immunogenetics 58(4): 252-8.
[0506] Boissel, N., D. Rea, et al. (2006). “BCR/ABL oncogene directly controls MHC class I chain-related molecule A expression in chronic myelogenous leukemia.” J Immunol 176(8): 5108-16.
[0507] Borchers, M. T., N. L. Harris, et al. (2006). “NKG2D ligands are expressed on stressed human airway epithelial cells.” Am J Physiol Lung Cell Mol Physiol 291(2): L222-31.
[0508] Bottino, C., R. Castriconi, et al. (2005). “Cellular ligands of activating NK receptors.” Trends Immunol 26(4): 221-6.
[0509] Chan, C. W., E. Crafton, et al. (2006). “Interferon-producing killer dendritic cells provide a link between innate and adaptive immunity.” Nat Med 12(2): 207-13.
[0510] Chen, X. M., X. Q. Xu, et al. (2008). “NKG2D ligands expression and NKG2D-mediated cytotoxicity in human laryngeal squamous carcinoma cells.” Scand J Immunol 67(5): 441-7.
[0511] Choy, M. K. and M. E. Phipps “MICA polymorphism: biology and importance in immunity and disease.” Trends Mol Med 16(3): 97-106.
[0512] Dai, Z., C. J. Turtle, et al. (2009). “Normally occurring NKG2D+CD4+ T cells are immunosuppressive and inversely correlated with disease activity in juvenile-onset lupus.” J Exp Med 206(4): 793-805.
[0513] Dressel, R., J. Schindehutte, et al. (2008). “The tumorigenicity of mouse embryonic stem cells and in vitro differentiated neuronal cells is controlled by the recipients' immune response.” PLoS One 3(7): e2622.
[0514] Eagle, R. A., I. Jafferji, et al. (2009). “Beyond Stressed Self: Evidence for NKG2D Ligand Expression on Healthy Cells.” Curr Immunol Rev 5(1): 22-34.
[0515] Eagle, R. A., J. A. Traherne, et al. (2006). “Regulation of NKG2D ligand gene expression.” Hum Immunol 67(3): 159-69.
[0516] Eagle, R. A. and J. Trowsdale (2007). “Promiscuity and the single receptor: NKG2D.” Nat Rev Immunol 7(9): 737-44.
[0517] Ehrlich, L. I., K. Ogasawara, et al. (2005). “Engagement of NKG2D by cognate ligand or antibody alone is insufficient to mediate costimulation of human and mouse CD8+ T cells.” J Immunol 174(4): 1922-31.
[0518] Eleme, K., S. B. Taner, et al. (2004). “Cell surface organization of stress-inducible proteins ULBP and MICA that stimulate human NK cells and T cells via NKG2D.” J Exp Med 199(7): 1005-10.
[0519] Fernandez-Messina, L., O. Ashiru, et al. “Differential mechanisms of shedding of the glycosylphosphatidylinositol (GPI)-anchored NKG2D ligands.” J Biol Chem 285(12): 8543-51.
[0520] Fernandez-Morera, J. L., S. Rodriguez-Rodero, et al. (2008). “Soluble MHC class I chain-related protein B serum levels correlate with disease activity in relapsing-remitting multiple sclerosis.” Hum Immunol 69(4-5): 235-40.
[0521] Fernandez-Morera, J. L., S. Rodriguez-Rodero, et al. (2008). “Genetic influence of the nonclassical major histocompatibility complex class I molecule MICB in multiple sclerosis susceptibility.” Tissue Antigens 72(1): 54-9.
[0522] Gambelunghe, G., A. Brozzetti, et al. (2007). “MICA gene polymorphism in the pathogenesis of type 1 diabetes.” Ann N Y Acad Sci 1110: 92-8.
[0523] Gasser, S., S. Orsulic, et al. (2005). “The DNA damage pathway regulates innate immune system ligands of the NKG2D receptor.” Nature 436(7054): 1186-90.
[0524] Groh, V., A. Bruhl, et al. (2003). “Stimulation of T cell autoreactivity by anomalous expression of NKG2D and its MIC ligands in rheumatoid arthritis.” Proc Natl Acad Sci USA 100(16): 9452-7.
[0525] Houchins, J. P., T. Yabe, et al. (1991). “DNA sequence analysis of NKG2, a family of related cDNA clones encoding type II integral membrane proteins on human natural killer cells.” J Exp Med 173(4): 1017-20.
[0526] Hue, S., J. J. Mention, et al. (2004). “A direct role for NKG2D/MICA interaction in villous atrophy during celiac disease.” Immunity 21(3): 367-77.
[0527] Ito, T., N. Ito, et al. (2008). “Maintenance of hair follicle immune privilege is linked to prevention of NK cell attack.” J Invest Dermatol 128(5): 1196-206.
[0528] Kirsten, H., E. Petit-Teixeira, et al. (2009). “Association of MICA with rheumatoid arthritis independent of known HLA-DRB1 risk alleles in a family-based and a case control study.” Arthritis Res Ther 11(3): R60.
[0529] Kondo, M., T. Maruoka, et al. “Comparative genomic analysis of mammalian NKG2D ligand family genes provides insights into their origin and evolution.” Immunogenetics.
[0530] Larson, J. H., B. M. Marron, et al. (2006). “Genomic organization and evolution of the ULBP genes in cattle.” BMC Genomics 7: 227.
[0531] Li, Y., B. Xia, et al. “MICB0106 gene polymorphism is associated with ulcerative colitis in central China.” Int J Colorectal Dis 25(2): 153-9.
[0532] Lopez-Hernandez, R., M. Valdes, et al. “Association analysis of MICA gene polymorphism and MICA-129 dimorphism with inflammatory bowel disease susceptibility in a Spanish population.” Hum Immunol 71(5): 512-4.
[0533] McFarland, B. J. and R. K. Strong (2003). “Thermodynamic analysis of degenerate recognition by the NKG2D immunoreceptor: not induced fit but rigid adaptation.” Immunity 19(6): 803-12.
[0534] McGilvray, R. W., R. A. Eagle, et al. “ULBP2 and RAET1E NKG2D ligands are independent predictors of poor prognosis in ovarian cancer patients.” Int J. Cancer.
[0535] McGilvray, R. W., R. A. Eagle, et al. (2009). “NKG2D ligand expression in human colorectal cancer reveals associations with prognosis and evidence for immunoediting.” Clin Cancer Res 15(22): 6993-7002.
[0536] O'Callaghan, C. A., A. Cerwenka, et al. (2001). “Molecular competition for NKG2D: H60 and RAE1 compete unequally for NKG2D with dominance of H60.” Immunity 15(2): 201-11.
[0537] Ogasawara, K., J. A. Hamerman, et al. (2004). “NKG2D blockade prevents autoimmune diabetes in NOD mice.” Immunity 20(6): 757-67.
[0538] Paschen, A., A. Sucker, et al. (2009). “Differential clinical significance of individual NKG2D ligands in melanoma: soluble ULBP2 as an indicator of poor prognosis superior to S100B.” Clin Cancer Res 15(16): 5208-15.
[0539] Rodriguez-Rodero, S., L. Rodrigo, et al. (2006). “MHC class I chain-related gene B promoter polymorphisms and celiac disease.” Hum Immunol 67(3): 208-14.
[0540] Stern-Ginossar, N., C. Gur, et al. (2008). “Human microRNAs regulate stress-induced immune responses mediated by the receptor NKG2D.” Nat Immunol 9(9): 1065-73.
[0541] Suemizu, H., M. Radosavljevic, et al. (2002). “A basolateral sorting motif in the MICA cytoplasmic tail.” Proc Natl Acad Sci USA 99(5): 2971-6.
[0542] Sutherland, C. L., B. Rabinovich, et al. (2006). “ULBPs, human ligands of the NKG2D receptor, stimulate tumor immunity with enhancement by IL-15.” Blood 108(4): 1313-9.
[0543] Van Belle, T. L. and M. G. von Herrath (2009). “The role of the activating receptor NKG2D in autoimmunity.” Mol Immunol 47(1): 8-11.
[0544] Ward, J., M. Bonaparte, et al. (2007). “HIV modulates the expression of ligands important in triggering natural killer cell cytotoxic responses on infected primary T-cell blasts.” Blood 110(4): 1207-14.
[0545] Wilkinson, G. W., P. Tomasec, et al. (2008). “Modulation of natural killer cells by human cytomegalovirus.” J Clin Virol 41(3): 206-12.
[0546] Wu, J., Y. Song, et al. (1999). “An activating immunoreceptor complex formed by NKG2D and DAP10.” Science 285(5428): 730-2.
[0547] Yabe, T., C. McSherry, et al. (1993). “A multigene family on human chromosome 12 encodes natural killer-cell lectins.” Immunogenetics 37(6): 455-60.

### Example 8

### Alopecia Areata Immunopathogenesis and NKG2D Receptor Ligand Interaction in Mice and Humans

[0548] Genomewide Association study undertaken earlier implicates NKG2D receptor-ligand interaction as well as several T-cell specific genes in the immunopathogenesis of alopecia areata (AA). Here the mechanisms of follicular dystrophy mediated by NKG2D+ lymphocytic cytotoxicity against the hair follicle were elucidated. The resident skin and cutaneous lymph node immune population was assessed in C3H/HeJ—murine model of AA and a sizable expansion of the αβ T-cells with immunophenotypic signature of NK reprogramming marked by NKG2D, NKG2A/C/E, CD49b, syk and IL-15 expression was observed. Global transcriptional analysis of AA skin indicated a predominant IFNγ Inflammatory signature. An IFNγ mediated overexpression of NKG2D ligands—ULBP3 and MICA was observed in the HF and HF derived dermal sheath cells ex vivo and in vivo. NKG2D dependent elevated follicular recruitment of lymphocytes and apoptosis is observed after IFNγ treatment and recapitulated in the AA follicle. Interestingly several microRNAs putatively binding to ULBPs was downregulated in skin and was shown to suppress the expression in vitro. Thus gamma interferon plays a vital role in AA etiology by priming the immune system and the end organ for NKG2D mediated cytolysis.

[0549] Introduction.

[0550] Alopecia Areata (AA) is a widespread autoimmune disorder affecting close to 5 million people in United States and holds a lifetime risk of 1.7% in the general population. The disease etiology comprises an autoimmune attack against the hair follicles (HF) in the skin, infiltration of the surrounding skin with immune-response cells and elevated inflammatory cytokine and chemokine levels resulting in cessation of hair growth and subsequent non scarring alopecia. Interestingly, alopecia areata is often associated with other autoimmune disorders such as celiac disease, rheumatoid arthritis and Type I diabetes.

[0551] Hair follicle being a micro-organ represents a special niche where cellular components of mesenchymal, epithelial and neuroectodermal origin interact and sequestration of potentially autoreactive antigens, making the HF susceptible to immune attack as seen in conditions of inflammation such as lichen planopilaris, folliculitis decalvans and autoimmune disorders which initiate hair pathology—Primarily AA, SLE, scleroderma or leukotrichia—(vitiligo). Normally, several mechanisms enable immune tolerance in the hair follicle—the levels of major histocompatibilty family proteins are low—inhibiting detection of reactive autoantigens, release of immunosuppressive cytokines and hormones such as TGFb, ACTH, IGF1 by anagen hair bulb. The number perifollicular as well as intrafollicular lymphocytes and the antigen presenting langerhans cells numbers are low are very low compared to dermis and epidermis (Paus, Nickoloff et al. 2005).

[0552] Alopecia areata is characterized by presence of CD8+ve T-cells intrafollicular and CD4+ve T-cells perifollicular infiltrates (Todes-Taylor, Turner et al. 1984). NK cells are also present in the infiltrate (Ito, Ito et al. 2008). In severe cases of alopecia areata greater number of NK and T-cell populations is observed in the peripheral blood lymphocytes of the AA patients (Imai, Miura et al. 1989). Activating receptors present on the surface of immune cells recognize viral associated antigens or aberrant self antigens and trigger cytotoxic activity (Bottino, Castriconi et al. 2005). NKG2D, an activating cell surface receptor is present canonically on the surface of NK, NKT, γδ T-Cells and all human and activated mouse CD8+ve T-cells (Ehrlich, Ogasawara et al. 2005), Interferon producing killer dendritic cells (Chan, Crafton et al. 2006) and regulatory T-cells. NKG2D receptor lacks an intracellular signaling domain and requires the adaptor protein DAP10 for downstream signal transduction via syk and PI3K pathway (Wu, Song et al. 1999). NKG2D receptor shows promiscuous binding to a variety of ligands belonging to the non classical members of the MHC superfamily. Two classes of NKG2D Ligands are present in humans donated as MIC (A and B) and the ULBP (1-6) family and three in mice—Rae1 (α-ε) {retinoic acid early inducible}, H60 {histocompatibility antigen 60} and Mult1 {murine ULBP-like transcript 1}. The Families differ in their structure, chromosomal position and sequence (Eagle and Trowsdale 2007).

[0553] NKG2D ligands act as a first line of defense alerting the innate immune system of the presence of aberrant or transformed cells. Stressors which cause cellular damage such as heat shock, oxidative stress or pharmacological agents such as (proteasome inhibitors, HDAC inhibitors—trichostatin A, valproic acids and cisplatin) induce NKG2D expression. (Eagle, Jafferji et al. 2009). The surface expression of NKG2D ligands is also regulated at a transcriptional and post translational level. At a transcriptional level the promoter regions of the ligands contain different putative transcription factor binding sites influencing differential tissue specific expression as well as regulation under stress (Eagle, Traherne et al. 2006). A number of microRNAs have also been shown to bind the 3′UTR of MIC genes and inhibit the transcript levels of the ligands (Stern-Ginossar, Gur et al. 2008).

[0554] Cytokine profile of alopecia areata patients displays a bias towards Th1 response (Ghoreishi, Martinka et al.; Barahmani, Lopez et al. 2009) and IFNg levels are elevated in the patient serum and C3H/HeJ mice (Arca, Musabak et al. 2004) (Gilhar, Landau et al. 2003) C3H/HeJ mouse strain, which is genetically susceptible to AA fails to develop lesions when deficient in IFN-γ (Freyschmidt-Paul, McElwee et al. 2006). IFN-γ inducible chemokines MIG, MCP1 and IP-10 are present in AA skin which further sets up a cycle of recruitment of activated T-cells, B-cells, NK and dendritic cells into the tissue (Benoit, Toksoy et al. 2003). Proinflammatory cytokines serum levels—IL-1b, IL-2, IL-12, IL-6 and IL-10 are significantly elevated in patients (Hoffmann 1999; Barahmani, Lopez et al. 2009). This proinflammatory microenvironment of the diseased skin is associated with induction of activating ligands MHC class I and II antigens and Fas ligand on the AA hair follicle (Bodemer, Peuchmaur et al. 2000). MICA and ULBP3—NKG2D ligands are also upregulated in the AA follicle and are a potential recruiter of the cytotoxic T-cells and NK cells. (Ito, Ito et al. 2008), (Petukhova, Duvic et al. 2010)). NKG2D functions to eliminate the aberrant self cells and dysregulation of this recognition process often leads to development of autoimmunity disorders. Interestingly, a study also demonstrated an infiltration of the peribulbular tissue with NKG2D+ve CD8 and NK cells. NKG2D as well as NKG2C density were higher in NK cells of AA patients (Ito, Ito et al. 2008). Previous work showed for the first time the involvement of the ULBP family of NKG2D ligands in the pathogenesis of the autoimmune disease—alopecia areata ((Petukhova, Duvic et al. 2010)).

[0555] Given the association of NKG2D ligand, IFNG and SOCS1 loci with human AA, without being bound by theory, aberrant NKG2DL up-regulation and persistent NKG2D activation mediated by elevated gamma interferon signaling in skin, can drive AA pathogenesis. Infiltration of AA skin with NK reprogrammed T-cells which bear NK specific markers such as DX5 and NKG2A/C/E accompanied with elevated expression of inducing interleukin 15 in the hair follicle, as well as surrounding immune cells, was observed. The numbers of NKG2D bearing cytotoxic T-cells were also significantly higher in the cutaneous lymph nodes. Transcriptional profiling of the alopecic skin indicated a massive inflammatory response in the affected skin of the AA mouse model—C3H/HeJ. Further analysis showed a predominant skew towards gamma interferon regulated genes in the AA skin indicating strong interferon signaling in alopecia areata. Hair follicles also exhibited strong NKG2DL expression in response to gamma interferon treatment at both transcriptional as well as translational levels. Preincubation of skin derived primers cells as well as organ cultured HFs with IFNg led to elevated cytotoxicity by lymphokine activated cells. Specific autoimmune mechanisms underlying alopecia areata have remained obscure and given its high prevalence, strong association with other autoimmune disorders and accessibility of HF as disease model warrants a further study of the role of NKG2D receptor-ligand interaction pathway for development of a wide spectrum drug for autoimmune disorders.

[0556] Results

[0557] NK reprogramming of the T-cells in alopecic skin and cutaneous lymph nodes. NK-Reprogrammed CD8 T Cells infiltrate Alopecia Areata Skin. (a) Immunoflourescence of NKG2D, CD8, CD4 in skin. (b) NKG2D vs. CD8 T cell plot. (c) DX5, NKG2A/C/E, Syk expression of these cells. (d) IL-15 expression in hair follicle.

[0558] NKG2D+CD8+ T cells are expanded in alopecic cutaneous lymph nodes. (a) Enlarged cutaneous lymphnodes in AA mice. (b) CD4/CD8-NKG2D/CD8 flow. (c) DX5, CXCR3, CCR5, CD25 flow of these cells. (d) IFN-gamma, IL-17 and Foxp3 of CD4 T cells and CD8 NKG2D positive T cells. (e) and (f) Spectratype and transcriptional profile.

[0559] The Interferon gamma response dominates the inflammatory response in AA skin. (a) Interferon producing immune cell types. (b) Heat map for inflammatory/immunegenes. (c) Confirmatory RT-PCRs for microarray. (d) Table of interferon response upregulated genes.

[0560] NKG2D ligands are expressed in lesional hair follicles and are upregulated by IFN-g. (a) AA Rae-1 staining in hair follicle. (b) AA upregulated transcripts. (c) Upregulation in situ by injected IFN-gamma. (d) Transcriptional upregulation in vitro-Luciferase assay.

[0561] CD8 T cells engage IFN-g primed hair follicles and are cytolytic in an NKG2D-dependent manner. (a) CFSE labeled T cells interact with alopecic but not uninvolved Hair follicles. (b) CFSE labeled T cells interact with IFN-gamma primed hair follicles. (c) Cytotoxic response related gene upregulation in AA. (d) Elevated no. of Apoptotic Cells in DS after cytotoxic killing. (e) Interferon gamma treated dermal sheath cells are sensitized to NKG2D mediated killing.

[0562] Human NKG2D-dependent killing assay. (a) Human upregulation of NKG2D ligands. (b) Upregulation when treated with IFNg in DS and fibs. (c) Human cytotoxic cell recruitment. (d) Human NKG2DL overexpression and cytotoxic mediation. (e) Human cytotoxicity assay (repeat for significant p-value).

[0563] Stress mediated Micro RNA regulation of NKG2D ligands. (a) Bioinformatics analysis of the 3′UTRs or ULBP3 and ULBP6 for putative microRNA binding sites. (b) RT-PCR for the common microRNA binding sites after IFN, IFN/LPS and TNF treatment. (c) Luciferase assay under stress conditions for IFNg, IFNg/LPS and TNFa in primary cultured cells and 293T cells. (d) Luciferase assay with cotransfected -3′UTR Luciferase construct and microRNA of interest to show there negative effect on mRNA stability.

[0564] NK Reprogramming of the T-Cells in Alopecic Skin and Cutaneous Lymph Nodes.

[0565] As reported in earlier studies, a predominance of the T-cells in the alopecic skin was observed, as determined by immunofluoroscence staining of the skin by CD8, CD4 T-cells and γδ T-cells. These cells types comprise the main ranks of NKG2D receptor bearing immune population. Co-localization of the CD8 and CD4 T-cells with NKG2D marker was observed in the immune infiltrate surround the hair follicle in the alopecia areata skin. The main cytotoxic T-cell population the NKG2D bearing CD8 cells was analyzed, and it was observed that the cytotoxic T-cells were expanded in the AA skin from (X % to X %) as compared to age matched controls and a greater fraction was NKG2D positive. This phenomenon is reminiscent of NK reprogramming observed in celiac disease a closely related autoimmune (16682498). Thus, the cytotoxic T-cells for other NK specific markers—DX5, NKG2A/C/E and Syk, was further analyzed.

[0566] IL-15 levels in the skin of AA compared to age matched were analyzed, and comparatively higher levels in the HF were observed, as well as expression in immune cells comprising the infiltrate. Thus skin comprises of higher levels of NKG2D bearing NK like T-cells.

[0567] The cutaneous lymph node immune cell population was further analyzed. Both the axillary and inguinal as well as the spleen were enlarged in the AA mouse. Flowcytometric analysis of the T-cells showed a skewing of the CD4/CD8 ratio from X to X indicating an expansion of cytotoxic phenotype. Greater percentage of the CD positive T-cells also expressed NKG2D receptor in the lymph nodes.

[0568] The Interferon Gamma Response Dominates the Inflammatory Response in AA Skin.

[0569] T-cells as well as other immune cells—macrophages, dendritic cells as well as neutrophils enriched in AA skin comprise a major source of gamma interferon in the skin. These cells are known to mediate inflammation and related tissue damage. Transcriptional analysis of the Alopecia areata skin in comparison to unaffected age matched skin was carried out using microarray technology (N=3). Total RNA was isolated from whole skin, and hybridized to the Affymetrix Mouse 430 2.0 Genechip. Using Genespring, we obtained 485 transcripts that were significantly (p≦0.05) and differentially regulated (≧2×).

[0570] The alopecia areata skin displayed a predominantly elevated inflammatory signature as indicated by fold change heat map. The microarray data was further confirmed using quantitative real-time PCR and a similar trend of elevated inflammatory markers was observed. The differentially expressed gene were further analyzed for overrepresentation of genes of specific biological pathways using software DAVID and striking evidence for the IFN response in AA, in that 16 of the top 20 induced genes, including the chemokines Cxcl9/10/11, were known to be IFN-response genes. This signature is likely due to Ifng since Type I interferons were not induced in AA skin.

[0571] Dominance of IFNg response in the AA skin was independently validated by utilizing an interferon signaling and response qPCR array (Stellarray™) assaying X genes. A significant upregulation (p-value<X) was observed in AA skin with X genes showing greater than two fold upregulation. Interestingly, genes including Icos, Tap2 and Ifng were upregulated in alopecic mice and reside within chromosomal regions significantly associated with AA in our GWAS.

[0572] Gamma Interferon Mediated NKG2D Ligand Overexpression and Cytotoxicity in Murine and Human Hair Follicle.

[0573] NKG2D receptor interfaces with a plethora of NKG2D ligands to mediate its cytolytic effects. The expression of NKG2DLs was further analyzed in AA skin as compared to unaffected a higher expression of all NKG2D ligands as well as expression in HF infiltrate was in AA skin as determined by anti-Rae1 antibodies. Analysis of the transcript levels of different rae 1 isoforms, H60 and multi indicated by a general upregulation of the nkg2d ligand transcripts with significant expression of rae 1e and h60 p<0.05. To examine the situation in vivo, NKG2DL induction was examined in murine skin after intra-dermal injections of IFNγ, LPS and IFNγ/LPS. Staining of the skin, 24 hour post-treatment showed that both IFNγ and TLRs induced total NKG2DL and Rae1 expression in the hair follicles, predicting their sensitivity to NKG2D-mediated cytotoxic attack. To assess the role of inflammatory cytokines on ULBP promoter activity, dermal sheath cells were transfected with luciferase reporter construct containing 3′ upstream 5-kb promoter region of ulbp3 gene. A significant elevation in the promoter activity was observed in ULBP3 following an 8 hr IFNγ treatment (p-value<0.01). Similar increase of ulbp3 promoter activity was observed after 16 hr IFNγ treatment of dermal sheath and fibroblasts.

[0574] C3H/HeJ mice vibrissae follicles were microdissected and organ cultured for 2 days in presence of proinflammatory cytokine—IFNγ and TLR ligand—LPS. Individual follicles were subsequently incubated with green CFSE labeled LAK cells (IL-2 stimulated PBMCs) overnight to assess immune interaction. Increased accumulation of LAK cells was observed on treated follicles indicating an up-regulation of interacting ligands. Interestingly, untreated follicles derived from alopecic mice but not unaffected mice also showed enhanced LAK cell recruitment presumably due to NKG2DL upregulation in vivo. Several transcripts associated with cytotoxic immune response category derived from Gene Ontology website (http://www.geneontology.org/) were upregulated in the AA skin as compared to age matched controls. It was further determined whether increased immune recruitment to the hair follicle is associated with higher apoptosis in the dermal sheath layer. Indeed, a higher percentage of TUNEL positive cells in the IFNγ and LPS treated follicles was observed, as compared to the untreated.

[0575] A lactate dehydrogenase release based cytotoxicity assay was established, using primary cultured dermal sheath or dermal papilla cells as target cell population and splenocytes expanded for 7 days in high dose IL-2 as cytotoxic effectors. CD8 T-cells from these cultures, so-called “lymphokine activated killer” or LAK cells, express NKG2D. Consistent with prior data demonstrating NKG2DL induction, IFNγ and LPS treatment for 3 days rendered DS cells sensitive to LAK-mediated cytotoxicity in an NKG2D-dependent manner.

[0576] Human hair follicles were micro-dissected and organ cultured for 2 days in the presence of IFNγ with or without TLR ligands. Immunofluorescence staining of the human follicles for NKG2D Ligands—MICA, ULBP3 and Pan NKG2DL shows higher expression in the DS compartment of the hair follicle post treatment. To examine whether IFN-γ directly regulates NKG2DL transcription, dermal sheath (DS) cells were derived and primary cultured from micro-dissected human hair follicles and treated with IFNγ for 24 h and the transcript levels of NKG2DLs were assessed by real-time qPCR (N=4). Message levels of NKG2DLs ULBP3 and MICA were upregulated. The protein expression induction by IFN-γ is stronger than that seen at the RNA level for NKG2D Ligands, indicating pos-transcriptional regulation. Organ cultured scalp derived human HFs in presence of proinflammatory cytokine—IFNγ and TLR ligand—LPS were incubation with LAK (lymphokine activated killer) cells. Treated HFs yielded greater lymphocytic recruitment to the follicular surface upon LAK coincubation. The specificity of this interaction was further tested using lactate dehydrogenase release based cytotoxicity assay using cultured skin derived epithelial (keratinocytes) cells. Keratinocyte lysis by LAK cells was blocked by anti-NKG2D or MHC-1 antibodies, thus confirming the dependence of cytotoxicity on these signals.

[0577] Interferon Dependent Regulation of NKG2DL Expression by microRNAs. (a)

[0578] Bioinformatics analysis of the 3′UTRs or ULBP3 and ULBP6 for putative microRNA binding sites; (b) RT-PCR for the common microRNA binding sites after IFN, IFN/LPS and TNF treatment; (c) Luciferase assay under stress conditions for IFNg, IFNg/LPS and TNFa in primary cultured cells and 293T cells. (d) Luciferase assay with cotransfected -3′UTR Luciferase construct and microRNA of interest to show there negative effect on mRNA stability (e.g., mir124).

[0579] Discussion

[0580] A paradigm shifting model to explain the emergence of autoimmunity was proposed by Polly Matzinger which postulates that immune system reacts in response to danger signals presented by damaged or distressed tissue and autoimmunity arises when the danger signals do not resolve and are presented chronically (Matzinger 2002). Thus autoimmunity is inherent but transient in normal individuals but acquires pathology when activated long term. In the model's context, danger signals are defined as intrinsic cellular components which are released or presented by cells under conditions of stress, damage or inappropriate cell death (necrosis). Various cellular components have been identified as danger signals or “alarmins”—HMGB1, S100s, heatshock proteins, uric acid etc (Tveita) (Bianchi 2007). Several scenarios can lead to development of autoimmunity under this model. Highly specialized organ specific antigens normally sequestered within the cell, when aberrantly displayed on antigen presenting cells (APCs) can act as danger signals. This is observed in case of vitiligo and alopecia areata where anti-melanocytic autoantibodies are presented. The development of autoimmunity is decided by whether or not tolerogenic signals prevail over immunogenic or activating signals. In alopecia areata the tolerogenic signals diminish as the MHCI levels increase on hair follicles combined with increase in the activation signaling to cytotoxic cells by NKG2D ligands MICA and ULBPs. APCs play an important role as a switch between tolerance and immunogenicity.

[0581] NKG2D functions to eliminate the aberrant self cells and dysregulation of this recognition process often leads to development of autoimmunity disorders (Van Belle and von Herrath 2009). In rheumatoid arthritis patients, greater numbers of circulating as well as resident CD4 positive cells express NKG2D ligand. These Helper T-cells exhibit a cytotoxic profile with secretion of IFNg, perforin, granzyme B and cytolytic ability. The synoviocytes in RA also secrete soluble MICA into the synovial fluid. (Groh, Bruhl et al. 2003). Crohn's disease patients exhibit elevated MICA staining in the lamina propria as well as a CD4 positive cells which express NKG2D receptor, secrete IFNg and perforin and are cytolytic (Allez, Tieng et al. 2007). MICA levels were found to be upregulated in active cases of celiac disease which lower with gluten free diet, along with higher soluble MICA concentrations in the patient's sera. Elevated NKG2D density was observed on intraepithelial lymphocytes of patients along with more efficient NKG2D facilitated cytotoxic response against epithelial cells (Hue, Mention et al. 2004).

[0582] Non Obese diabetic mice are used as a model of type I diabetes in humans. A study done in these mice elucidates the importance of NKG2D receptor engagement in the development of pancreatic β-cell autoimmunity. The levels of Rae1—the murine NKG2D ligand were elevated in NOD mice compared to control balb/c mice and exhibited progressive increase with age in NOD as well as NOD SCID mice indicating that elevation of rae 1 is independent of immune response. Interestingly, NKG2D neutralizing antibody treatment in NOD mice prevented the development of T1D, underscoring the importance of NKG2D pathway in the development of autoimmunity (Ogasawara, Hamerman et al. 2004). In cases of multiple sclerosis as well elevated MICB serum levels were associated with disease relapse (Fernandez-Morera, Rodriguez-Rodero et al. 2008). Interestingly, a previous study also demonstrated an elevation of MICA ligand in the hair follicle of alopecia areata along with infiltration of the peribulbular tissue with NKG2D+ve CD8 and NK cells. NKG2D as well as NKG2C density were higher in NK cell of AA patients (Ito, Ito et al. 2008) and the data herein).

[0583] The involvement of ULBP family of NKG2D ligands in the pathogenesis of the autoimmune disease—alopecia areata was shown for the first time (the GWAS Data). Allelic polymorphisms in NKG2D ligands are increasingly being associated with various autoimmune disorders. Specific MICA alleles are overrepresented in rheumatoid arthritis, inflammatory bowel disease and T1D diabetes patients implicating their role in disease pathogenesis (Kirsten, Petit-Teixeira et al. 2009), (Lopez-Hernandez, Valdes et al.) (Gambelunghe, Brozzetti et al. 2007). MICB polymorphisms are also associated with celiac disease, ulcerative colitis and multiple sclerosis (Li, Xia et al.), (Fernandez-Morera, Rodriguez-Rodero et al. 2008), (Rodriguez-Rodero, Rodrigo et al. 2006).

[0584] C3H/HeJ Mice strain of mice presents a spontaneous development of disease in 20% of the population by the age of 18 months (Sundberg, Cordy et al. 1994). AA can be induced in normal C3H/HeJ mice at higher frequencies and in a more predictable manner by full thickness grafting of lesional skin (McElwee, Boggess et al. 1998). Human Skin Grafted Severe combined immune deficient (SCID) mice which lack functional B-cells and T-cells are frequently used to model a human equivalent model of AA. The ability of SCID mice to tolerate xenografts is utilized to graft human skin on mice, which can then be tested by adoptive transfer of AA patient lymphocytes for disease development and remission. (Gilhar, Landau et al. 2002). Both IFN-gamma and FasL are required, consistent with CD8 mediated toxicity driven by Th1 help. (Freyschmidt-Paul, Zoller et al. 2005; McElwee, Freyschmidt-Paul et al. 2005). However this understanding remains incomplete; the cellular sources of IFNgamma/FasL (Freyschmidt-Paul, McElwee et al. 2003; Freyschmidt-Paul, McElwee et al. 2006) are unknown and the specific mechanistic contributions of IFNs have not been described. In particular the contributions of the NKG2D pathway remain unexplored and the GWAS indicate an alternative theory, namely that NKG2D-bearing cells are likely crucial to the innate and subsequent adaptive response.

[0585] Materials and Methods

[0586] Animals. C3H/HeJ, C57B1/6 and Syk−/− mice at various stages of hair cycle as well as retired breeders were purchased from Jackson Laboratories. The mice were housed in a pathogen free barrier facility. Synchronized anagen was induced in the hair coat by shaving or by plucking. Animals were administered X IFNγ, X LPS and X TNFα and sterile PBS via intradermal injections. Blood was obtained by retro-orbital bleeding and stored in heparinized tubes to prevent coagulation. For tissue harvesting, the skin was shaven, flash frozen in liquid nitrogen and stored at −70° C.

[0587] Immune Cell Isolation and Culture from Skin and Cutaneous Lymph Nodes

[0588] Ex Vivo Organ Culture.

[0589] Scalp biopsies were acquired from clinic. The scalp skin was further microdissected to isolate individual hair follicular units. The HFs were cultured in serum free HF organ culture medium as described in protocols from Kondo and Philpott et al (Philpott, Sanders et al. 1996). Vibrissae hair follicles were also microdissected from murine facepads of C57B1/6 and C3H/HeJ mice and similarly cultured ex vivo for 7-10 days normal anagen growth. Individual follicles were cultured in the presence of 100 ng/ml IFNγ (PeproTech #315-05 or #300-02) individually or in combination with 1 ug/ml of LPS or 1 ug/ml of polydI:dC for 3 days. The follicles were embedded in OCT (Sakura Finetek) and 7-8 um longitudinal sections were cut and stored at −80° C.

[0590] Immunohistochemistry.

[0591] Mouse skin from age matched and alopecic mice was shaved and fixed in 10% formalin in PBS overnight followed by transfer to 70% ethanol for paraffin embedding. Skin was also embedded in OCT and frozen on dry ice. The frozen blocks were sectioned to a thickness of 7-8 μm. Frozen skin sections or hair follicle cross-sections were air dried and fixed in either 4% paraformaldehyde or Methanol/Acetone (1:1) solution followed by block in 10% normal donkey serum. The sections were incubated with the following antibodies—IL-15( ), Anti Rae1 ( ), ULBP3, MICA, Pan NKG2D Ligand ( ), NKG2D ( ), CD8, CD4, overnight. Following brief wash the sections were incubated with fluorescence labeled secondary antibodies (Invitrogen) and counterstained with DAPI. The sections were further visualized using Axioplan2 fluorescence and LSM5 exciter confocal microscopes from Zeiss. Axiovision and Zen softwares (Zeiss) were further used for image capture and analysis.

[0592] Primary Dermal Sheath/Fibroblast Culture.

[0593] Human foreskin was used to establish primary cultures of fibroblasts and keratinocytes. Interfollicular skin was dispase treated to separate the epidermal and dermal components and enzymatically processed to establish primary cultures of fibroblasts and keratinocytes. The hair follicles derived from scalp biopsies will be microdissected to separate the dermal sheath and the papilla and further used to culture dermal sheath cells (DS) and dermal papilla cells (DP) from explants.

[0594] Over Expression Constructs and Luciferase Assays.

[0595] 3 kb upstream promoter region of MICA, ULBP3 and ULBP6 were PCR amplified using primers. The fragments were then cloned into pGL3 basic vector plasmid upstream of the Luciferase gene. Dermal Sheath cells and HEK 293T cells were transiently transfected with the luciferase constructs and well as β-gal expression plasmid (e.g., using lipofectamine). 6-8 hours after transfection the 100 ng/ml of IFNγ was added to the media. The cells were harvested 8 hrs after IFNγ treatment and lysates were used to assay Luciferase activity (Promega E4530) on a luminometer. The β-galactosidase activity was assessed using enzymatic colorometric assay (Promega E2000) and read at 415 nm absorbance on a microplate reader after 30 min incubation at 37° C.

[0596] Cytotoxicity Assays.

[0597] Spleen and lymph nodes were harvested from mice, mashed and passed through 30 and 70 micron filters to obtain single cell immune cell suspension. RBC lysis was carried out to obtain lymphocytic population. The cells were cultured in IL-2 supplemented RPMI medium for a week to derive lymphokine activated killer cells. Organ culture of vibrissae hair follicles was carried out in presence of IFNγ, IFNγ/LPS for 3 days. Subsequently the LAK cells stained with CFSE were incubated with the hair follicle overnight. LAK cell interaction with the HF was visualized under GFP filter in a microscope. Hair follicle were further embedded in OCT and sectioned. TUNEL staining was carried out to determine the number of apoptotic cells. The number of cells was counted. Two tailed T-test was carried out to determine the difference between treatments.

[0598] FACS Analysis According to Methods Practiced in the Art.

[0599] Real Time-PCR+RT-PCR Arrays.

[0600] Total RNA was extracted from frozen livers using the RNeasy purification kit (Qiagen) in accordance with the manufacturer's protocol. DNase-treated total liver RNA was reverse transcribed using SuperScript II reverse transcriptase (Invitrogen). Real time PCR (RT PCR) was performed using SYBR Green Master Mix and the ABI Prism 7000 Sequence Detection System (Applied Biosystems). GAPDH and β-actin were used as internal control genes. Thermal cycling conditions consisted of an initial step at 95° C. for 10 min to activate the Taq DNA polymerase and 40 cycles of sequential denaturation at 95° C. for 15 s and annealing/extension at 60° C. for 60s. Data analysis was performed using the ABI Prism 7000 SDS Software (Applied Biosystems). The real-time PCR analysis was performed according to the comparative CT method (Amador-Noguez, Yagi et al. 2004). The p-values reported for these changes refer to a two-tailed t-test between the normalized CT values. Mouse Interferon Signaling & Response 96 StellARray™ qPCR array (Lonza #00188171) was used for quantitative Realtime PCR analysis of interferon regulated transcripts.

[0601] Microarray Data Analysis According to Methods Practiced in the Art.

### REFERENCES

[0602] Allez, M., V. Tieng, et al. (2007). “CD4+NKG2D+ T cells in Crohn's disease mediate inflammatory and cytotoxic responses through MICA interactions.” Gastroenterology 132(7): 2346-58.
[0603] Amador-Noguez, D., K. Yagi, et al. (2004). “Gene expression profile of long-lived Ames dwarf mice and Little mice.” Aging Cell 3(6): 423-41.
[0604] Arca, E., U. Musabak, et al. (2004). “Interferon-gamma in alopecia areata.” Eur J Dermatol 14(1): 33-6.
[0605] Barahmani, N., A. Lopez, et al. (2009). “Serum T helper 1 cytokine levels are greater in patients with alopecia areata regardless of severity or atopy.” Clin Exp Dermatol.
[0606] Benoit, S., A. Toksoy, et al. (2003). “Selective expression of chemokine monokine induced by interferon-gamma in alopecia areata.” J Invest Dermatol 121(4): 933-5.
[0607] Bianchi, M. E. (2007). “DAMPs, PAMPs and alarmins: all we need to know about danger.” J Leukoc Biol 81(1): 1-5.
[0608] Bodemer, C., M. Peuchmaur, et al. (2000). “Role of cytotoxic T cells in chronic alopecia areata.” J Invest Dermatol 114(1): 112-6.
[0609] Bottino, C., R. Castriconi, et al. (2005). “Cellular ligands of activating NK receptors.” Trends Immunol 26(4): 221-6.
[0610] Chan, C. W., E. Crafton, et al. (2006). “Interferon-producing killer dendritic cells provide a link between innate and adaptive immunity.” Nat Med 12(2): 207-13.
[0611] Eagle, R. A., I. Jafferji, et al. (2009). “Beyond Stressed Self: Evidence for NKG2D Ligand Expression on Healthy Cells.” Curr Immunol Rev 5(1): 22-34.
[0612] Eagle, R. A., I. A. Traherne, et al. (2006). “Regulation of NKG2D ligand gene expression.” Hum Immunol 67(3): 159-69.
[0613] Eagle, R. A. and J. Trowsdale (2007). “Promiscuity and the single receptor: NKG2D.” Nat Rev Immunol 7(9): 737-44.
[0614] Ehrlich, L. I., K. Ogasawara, et al. (2005). “Engagement of NKG2D by cognate ligand or antibody alone is insufficient to mediate costimulation of human and mouse CD8+ T cells.” J Immunol 174(4): 1922-31.
[0615] Fernandez-Morera, J. L., S. Rodriguez-Rodero, et al. (2008). “Soluble MHC class I chain-related protein B serum levels correlate with disease activity in relapsing-remitting multiple sclerosis.” Hum Immunol 69(4-5): 235-40.
[0616] Fernandez-Morera, J. L., S. Rodriguez-Rodero, et al. (2008). “Genetic influence of the nonclassical major histocompatibility complex class I molecule MICB in multiple sclerosis susceptibility.” Tissue Antigens 72(1): 54-9.
[0617] Freyschmidt-Paul, P., K. J. McElwee, et al. (2003). “Fas-deficient C3.MRL-Tnfrsf6(lpr) mice and Fas ligand-deficient C3H/HeJ-Tnfsf6(gld) mice are relatively resistant to the induction of alopecia areata by grafting of alopecia areata-affected skin from C3H/HeJ mice.” J Investig Dermatol Symp Proc 8(1): 104-8.
[0618] Freyschmidt-Paul, P., K. J. McElwee, et al. (2006). “Interferon-gamma-deficient mice are resistant to the development of alopecia areata.” Br J Dermatol 155(3): 515-21.
[0619] Freyschmidt-Paul, P., M. Zoller, et al. (2005). “The functional relevance of the type 1 cytokines IFN-gamma and IL-2 in alopecia areata of C3H/HeJ mice.” J Investig Dermatol Symp Proc 10(3): 282-3.
[0620] Gambelunghe, G., A. Brozzetti, et al. (2007). “MICA gene polymorphism in the pathogenesis of type 1 diabetes.” Ann N Y Acad Sci 1110: 92-8.
[0621] Ghoreishi, M., M. Martinka, et al. “Type 1 interferon signature in the scalp lesions of alopecia areata.” Br J. Dermatol.
[0622] Gilhar, A., M. Landau, et al. (2002). “Mediation of alopecia areata by cooperation between CD4+ and CD8+ T lymphocytes: transfer to human scalp explants on Prkdc (scid) mice.” Arch Dermatol 138(7): 916-22.
[0623] Gilhar, A., M. Landau, et al. (2003). “Transfer of alopecia areata in the human scalp graft/Prkdc (scid) (SCID) mouse system is characterized by a TH1 response.” Clin Immunol 106(3): 181-7.
[0624] Groh, V., A. Bruhl, et al. (2003). “Stimulation of T cell autoreactivity by anomalous expression of NKG2D and its MIC ligands in rheumatoid arthritis.” Proc Natl Acad Sci USA 100(16): 9452-7.
[0625] Hoffmann, R. (1999). “The potential role of cytokines and T cells in alopecia areata.” J Investig Dermatol Symp Proc 4(3): 235-8.
[0626] Hue, S., J. J. Mention, et al. (2004). “A direct role for NKG2D/MICA interaction in villous atrophy during celiac disease.” Immunity 21(3): 367-77.
[0627] Imai, R., J. Miura, et al. (1989). “[Correlation of activated T cells and natural killer (NK) cells with the disease activity of alopecia areata (AA)].” Nippon Hifuka Gakkai Zasshi 99(6): 743-5.
[0628] Ito, T., N. Ito, et al. (2008). “Maintenance of hair follicle immune privilege is linked to prevention of NK cell attack.” J Invest Dermatol 128(5): 1196-206.
[0629] Kirsten, H., E. Petit-Teixeira, et al. (2009). “Association of MICA with rheumatoid arthritis independent of known HLA-DRB1 risk alleles in a family-based and a case control study.” Arthritis Res Ther 11(3): R60.
[0630] Li, Y., B. Xia, et al. “MICB0106 gene polymorphism is associated with ulcerative colitis in central China.” Int J Colorectal Dis 25(2): 153-9.
[0631] Lopez-Hernandez, R., M. Valdes, et al. “Association analysis of MICA gene polymorphism and MICA-129 dimorphism with inflammatory bowel disease susceptibility in a Spanish population.” Hum Immunol 71(5): 512-4.
[0632] Matzinger, P. (2002). “The danger model: a renewed sense of self.” Science 296(5566): 301-5.
[0633] McElwee, K. J., D. Boggess, et al. (1998). “Experimental induction of alopecia areata-like hair loss in C3H/HeJ mice using full-thickness skin grafts.” J Invest Dermatol 111(5): 797-803.
[0634] McElwee, K. J., P. Freyschmidt-Paul, et al. (2005). “Transfer of CD8(+) cells induces localized hair loss whereas CD4(+)/CD25(−) cells promote systemic alopecia areata and CD4(+)/CD25(+) cells blockade disease onset in the C3H/HeJ mouse model.” J Invest Dermatol 124(5): 947-57.
[0635] Ogasawara, K., J. A. Hamerman, et al. (2004). “NKG2D blockade prevents autoimmune diabetes in NOD mice.” Immunity 20(6): 757-67.
[0636] Paus, R., B. J. Nickoloff, et al. (2005). “A ‘hairy’ privilege.” Trends Immunol 26(1): 32-40.
[0637] Petukhova, L., M. Duvic, et al. (2010). “Genome-wide association study in alopecia areata implicates both innate and adaptive immunity.” Nature 466(7302): 113-7.
[0638] Philpott, M. P., D. A. Sanders, et al. (1996). “Whole hair follicle culture.” Dermatol Clin 14(4): 595-607.
[0639] Rodriguez-Rodero, S., L. Rodrigo, et al. (2006). “MHC class I chain-related gene B promoter polymorphisms and celiac disease.” Hum Immunol 67(3): 208-14.
[0640] Stern-Ginossar, N., C. Gur, et al. (2008). “Human microRNAs regulate stress-induced immune responses mediated by the receptor NKG2D.” Nat Immunol 9(9): 1065-73.
[0641] Sundberg, J. P., W. R. Cordy, et al. (1994). “Alopecia areata in aging C3H/HeJ mice.” J Invest Dermatol 102(6): 847-56.
[0642] Todes-Taylor, N., R. Turner, et al. (1984). “T cell subpopulations in alopecia areata.” J Am Acad Dermatol 11(2 Pt 1): 216-23.
[0643] Tveita, A. A. “The danger model in deciphering autoimmunity.” Rheumatology (Oxford) 49(4): 632-9.
[0644] Van Belle, T. L. and M. G. von Herrath (2009). “The role of the activating receptor NKG2D in autoimmunity.” Mol Immunol 47(1): 8-11.
[0645] Wu, J., Y. Song, et al. (1999). “An activating immunoreceptor complex formed by NKG2D and DAP10.” Science 285(5428): 730-2.

### EQUIVALENTS

[0646] Those skilled in the art will recognize, or be able to ascertain, using no more than routine experimentation, numerous equivalents to the specific substances and procedures described herein. Such equivalents are considered to be within the scope of this invention, and are covered by the following claims.

1. A method for detecting the presence of or a predisposition to a hair-loss disorder in a human subject, the method comprising:
(a) obtaining a biological sample from a human subject; and
(b) detecting whether or not there is an alteration in the level of expression of an mRNA or a protein encoded by a HLDGC gene in the subject as compared to the level of expression in a subject not afflicted with a hair-loss disorder.

2. A method for detecting the presence of or a predisposition to a hair-loss disorder in a human subject, the method comprising:
(a) obtaining a biological sample from a human subject; and
(b) detecting the presence of one or more nucleotide polymorphisms (SNPs) in a chromosome region containing a HLDGC gene in the subject, wherein the SNP is selected from the SNPs listed in Table 2.

3. The method of claim 1, wherein the detecting comprises determining whether mRNA expression or protein expression of the HLDGC gene is increased or decreased as compared to expression in a normal sample.

4. The method of claim 1, wherein the detecting comprises determining in the sample whether expression of at least 2 HLDGC proteins, at least 3 HLDGC proteins, at least 4 HLDGC proteins, at least 5 HLDGC proteins, at least 6 HLDGC proteins, at least 6 HLDGC proteins, at least 7 HLDGC proteins, or at least 8 HLDGC proteins is increased or decreased as compared to expression in a normal sample.

5. The method of claim 1, wherein the detecting comprises determining in the sample whether expression of at least 2 HLDGC mRNAs, at least 3 HLDGC mRNAs, at least 4 HLDGC mRNAs, at least 5 HLDGC mRNAs, at least 6 HLDGC mRNAs, at least 6 HLDGC mRNAs, at least 7 HLDGC mRNAs, or at least 8 HLDGC mRNAs is increased or decreased as compared to expression in a normal sample.

6. The method of claim 2, wherein the chromosome region comprises region 2q33.2, region 4q27, region 4q31.3, region 5p13.1, region 6q25.1, region 9q31.1, region 10p15.1, region 11q13, region 12q13, region 6p21.32, or a combination thereof.

7. The method of claim 1, or 2, wherein the detecting comprises gene sequencing, selective hybridization, selective amplification, gene expression analysis, or a combination thereof.

8. The method of claim 3, wherein an increase in the expression of at least 2 HLDGC genes, at least 3 HLDGC genes, at least 4 HLDGC genes, at least 5 HLDGC genes, at least 6 HLDGC genes, at least 7 HLDGC genes, or at least 8 HLDGC genes indicates a predisposition to or presence of a hair-loss disorder in the subject.

9. The method of claim 3, wherein a decrease in the expression of at least 2 HLDGC genes, at least 3 HLDGC genes, at least 4 HLDGC genes, at least 5 HLDGC genes, at least 6 HLDGC genes, at least 7 HLDGC genes, or at least 8 HLDGC genes indicates a predisposition to or presence of a hair-loss disorder in the subject.

10. The method of claim 3, wherein the mRNA or protein expression level of the HLDGC gene in the subject is about 5-fold to about 70-fold increased, as compared to that in the normal sample.

11. The method of claim 3, wherein the mRNA or protein expression level of the HLDGC gene in the subject is about 5-fold to about 90-fold increased, as compared to that in the normal sample.

12. The method of claim 3, wherein the mRNA or protein expression level of the HLDGC gene in the subject is about 5-fold to about 70-fold decreased, as compared to that in the normal sample.

13. The method of claim 3, wherein the mRNA or protein expression level of the HLDGC gene in the subject is about 5-fold to about 90-fold decreased, as compared to that in the normal sample.

14. The method of claim 1, wherein the HLDGC gene is CTLA-4, IL-2, IL-21, IL-2RA/CD25, IKZF4, a HLA Region residing gene, PTGER4, PRDX5, STX17, NKG2D, ULBP6, ULBP3, HDAC4, CACNA2D3, IL-13, IL-6, CHCHD3, CSMD1, IFNG, IL-26, KIAA0350 (CLEC16A), SOCS1, ANKRD12, or PTPN2.

15. The method of claim 14, wherein the HLA Region residing gene is selected from the group consisting of a gene of the HLA Class I Region, a gene of the HLA Class II Region, PTPN22, and AIRE.

16. The method of claim 15, wherein the HLA Class I Region gene is HLA-A, HLA-B, HLA-C, HLA-DQB1, HLA-DRB1, MICA, MICB, HLA-G, or NOTCH4.

17. The method of claim 16, wherein the HLA Class II Region gene is HLA-DOB, HLA-DQA1, HLA-DQA2, HLA-DQB2, TAP2, or HLA-DRA.

18. The method of claim 1 or 2, wherein the hair-loss disorder comprises androgenetic alopecia, alopecia areata, telogen effluvium, alopecia totalis, hypotrichosis, hereditary hypotrichosis simplex, or alopecia universalis.

19. The method of claim 2, wherein the single nucleotide polymorphism is selected from the group consisting of rs1024161, rs3096851, rs7682241, rs361147, rs10053502, rs9479482, rs2009345, rs10760706, rs4147359, rs3118470, rs694739, rs1701704, rs705708, rs9275572, rs16898264, rs3130320, rs3763312, and rs6910071 rs6910071 (SEQ ID NOS 6153-6170, respectively, in order of appearance).

20. A cDNA- or oligonucleotide-microarray for diagnosis of a hair-loss disorder, wherein the microarray comprises SEQ ID NOS: 2, 4, 6, 8, 10, 12, 14, 16, 18, 20, 22, 24, or a combination thereof.

21. A cDNA- or oligonucleotide-microarray for diagnosis of a hair-loss disorder, wherein the microarray comprises SNPs listed in Table 2.

22. A cDNA- or oligonucleotide-microarray for diagnosis of a hair-loss disorder, wherein the microarray comprises SNPs rs1024161, rs3096851, rs7682241, rs361147, rs10053502, rs9479482, rs2009345, rs10760706, rs4147359, rs3118470, rs694739, rs1701704, rs705708, rs9275572, rs16898264, rs3130320, rs3763312, rs6910071, or a combination thereof (SEQ ID NOS 6153-6170, respectively, in order of appearance).

23. A method for determining whether a subject exhibits a predisposition to a hair-loss disorder using the microarray of claim 20, 21, or 22, the method comprising:
(a) obtaining a nucleic acid sample from the subject;
(b) performing a hybridization to form a double-stranded nucleic acid between the nucleic acid sample and a probe; and
(c) detecting the hybridization.

24. The method of claim 23, wherein the hybridization is detected radioactively, by fluorescence, or electrically.

25. The method of claim 23, wherein the nucleic acid sample comprises DNA or RNA.

26. The method of claim 23, wherein the nucleic acid sample is amplified.

27. A diagnostic kit for determining whether a sample from a subject exhibits a predisposition to a hair-loss disorder, the kit comprising a cDNA- or oligonucleotide-microarray of claim 20, 21, or 22.

28. A diagnostic kit for determining whether a sample from a subject exhibits increased or decreased expression of at least 2 or more HLDGC genes, the kit comprising a nucleic acid primer that specifically hybridizes to one or more HLDGC genes.

29. A diagnostic kit for determining whether a sample from a subject exhibits a predisposition to a hair-loss disorder, the kit comprising a nucleic acid primer that specifically hybridizes to a single nucleotide polymorphism (SNP) in a chromosome region containing a HLDGC gene, wherein the primer will prime a polymerase reaction only when a SNP of Table 2 is present.

30. The kit of claim 28 or 29, wherein the primer comprises a nucleotide sequence selected from the group consisting of SEQ ID NOS: 25-40 in Table 9.

31. The kit of claim 29, wherein the SNP is selected from the group consisting of rs1024161, rs3096851, rs7682241, rs361147, rs10053502, rs9479482, rs2009345, rs10760706, rs4147359, rs3118470, rs694739, rs1701704, rs705708, rs9275572, rs16898264, rs3130320, rs3763312, and rs6910071 (SEQ ID NOS 6153-6170, respectively, in order of appearance).

32. The kit of claim 28 or 29, wherein the HLDGC gene is CTLA-4, IL-2, IL-21, IL-2RA/CD25, IKZF4, a HLA Region residing gene, PTGER4, PRDX5, STX17, NKG2D, ULBP6, ULBP3, HDAC4, CACNA2D3, IL-13, IL-6, CHCHD3, CSMD1, IFNG, IL-26, KIAA0350 (CLEC16A), SOCS1, ANKRD12, or PTPN2.

33. The kit of claim 32, wherein the HLA Region residing gene is selected from the group consisting of a gene of the HLA Class I Region, a gene of the HLA Class II Region, PTPN22, and AIRE.

34. The kit of claim 33, wherein the HLA Class I Region gene is HLA-A, HLA-B, HLA-C, HLA-DQB1, HLA-DRB1, MICA, MICB, HLA-G, or NOTCH4.

35. The kit of claim 33, wherein the HLA Class II Region gene is HLA-DOB, HLA-DQA1, HLA-DQA2, HLA-DQB2, TAP2, or HLA-DRA.

36. A composition for modulating HLDGC protein expression or activity in a subject wherein the composition comprises an antibody that specifically binds to a HLDGC protein or a fragment thereof; an antisense RNA that specifically inhibits expression of a HLDGC gene that encodes the HLDGC protein; or a siRNA that specifically targets a HLDGC gene encoding the HLDGC protein.

37. The composition of claim 36, wherein the siRNA comprises a nucleic acid sequence comprising any one sequence of SEQ ID NOS: 41-6152.

38. The composition of claim 36, wherein the siRNA is directed to ULBP3, ULBP6, or PRDX5.

39. The composition of claim 36, wherein the antibody is directed to ULBP3, ULBP6, or PRDX5.

40. A method for inducing hair growth in a subject, the method comprising:
(a) administering to the subject an effective amount of a HLDGC modulating compound,
thereby controlling hair growth in the subject.

41. The method of claim 40, wherein the HLDGC gene is CTLA-4, IL-2, IL-21, IL-2RA/CD25, IKZF4, a HLA Region residing gene, PTGER4, PRDX5, STX17, NKG2D, ULBP6, ULBP3, HDAC4, CACNA2D3, IL-13, IL-6, CHCHD3, CSMD1, IFNG, IL-26, KIAA0350 (CLEC16A), SOCS1, ANKRD12, or PTPN2.

42. The method of claim 41, wherein the HLA Region residing gene is selected from the group consisting of a gene of the HLA Class I Region, a gene of the HLA Class II Region, PTPN22, and AIRE.

43. The method of claim 42, wherein the HLA Class I Region gene is HLA-A, HLA-B, HLA-C, HLA-DQB1, HLA-DRB1, MICA, MICB, HLA-G, and NOTCH4.

44. The method of claim 42, wherein the HLA Class II Region gene is HLA-DOB, HLA-DQA1, HLA-DQA2, HLA-DQB2, TAP2, and HLA-DRA.

45. The method of claim 40, wherein the modulating compound comprises an antibody that specifically binds to a the HLDGC protein or a fragment thereof; an antisense RNA that specifically inhibits expression of a HLDGC gene that encodes the HLDGC protein; or a siRNA that specifically targets the HLDGC gene encoding the HLDGC protein.

46. The method of claim 40, wherein the subject is afflicted with a hair-loss disorder.

47. The method of claim 46, wherein the hair-loss disorder comprises androgenetic alopecia, telogen effluvium, alopecia areata, telogen effluvium, tinea capitis, alopecia totalis, hypotrichosis, hereditary hypotrichosis simplex, or alopecia universalis.

48. A method for identifying a compound useful for treating alopecia areata or an immune disorder, the method comprising:
(a) contacting a NKG2D-positive (+) cell with a test agent in vitro in the presence of a NKG2D ligand; and
(b) determining whether the test agent altered the cell response to the ligand binding to the NKG2D receptor as compared to an NKG2D+ cell contacted with the NKG2D ligand in the absence of the test agent,
thereby identifying a compound useful for treating alopecia areata or an immune disorder.

49. The method of claim 48, wherein the test agent specifically binds a NKG2D ligand.

50. The method of claim 48, wherein the NKG2D ligand comprises ULBP1, ULBP2, ULBP3, ULBP4, ULBP5, ULBP6, or a combination thereof.

51. The method of claim 48, wherein the determining comprises measuring ligand-induced NKG2D activation of the NKG2D+ cell.

52. The method of claim 48, wherein the compound decreases downstream receptor signaling of the NKG2D protein.

53. The method of claim 48, wherein measuring ligand-induced NKG2D activation comprises one or more of measuring NKG2D internalization, DAP10 phosphorylation, p85 PI3 kinase activity, Akt kinase activity, production of IFNγ, and cytolysis of a NKG2D-ligand+ target cell.

54. The method of claim 48, wherein the NKG2D+ cell is a lymphocyte or a hair follicle cell.

55. The method of claim 54, wherein the lymphocyte is a Natural Killer cell, γδ-TcR+ T cell, CD8+ T cell, a CD4+ T cell, or a B cell.

56. A method of treating a hair-loss disorder in a mammalian subject in need thereof, the method comprising administering to the subject an antibody or antibody fragment that binds ULBP3, ULBP6, or PRDX5.

57. A method of treating a hair-loss disorder in a mammalian subject in need thereof, the method comprising administering to the subject an RNA molecule that specifically targets the ULBP3 gene encoding the ULBP3 protein.

58. A method of treating a hair-loss disorder in a mammalian subject in need thereof, the method comprising administering to the subject an RNA molecule that specifically targets the ULBP6 gene encoding the ULBP6 protein.

59. A method of treating a hair-loss disorder in a mammalian subject in need thereof, the method comprising administering to the subject an RNA molecule that specifically targets the PRDX5 gene encoding the PRDX5 protein.

60. The method of claim 57, 58, or 59, wherein the RNA molecule is an antisense RNA or a siRNA.

61. A method for treating or preventing a hair-loss disorder in a mammalian subject in need thereof, the method comprising administering to the subject a therapeutic amount of a pharmaceutical composition comprising a functional HLDGC gene that encodes the HLDGC protein, or a functional HLDGC protein, thereby treating or preventing a hair-loss disorder.

62. A method for treating or preventing a hair-loss disorder in a mammalian subject in need thereof, the method comprising administering to the subject a therapeutic amount of a pharmaceutical composition comprising the composition of claim 36, thereby treating or preventing a hair-loss disorder.

63. The method of claim 56, 57, 58, 59, 61, or 62, wherein the administering comprises a subcutaneous, intra-muscular, intra-peritoneal, or intravenous injection; an infusion; oral, nasal, or topical delivery; or a combination thereof.

64. The method of claim 61, wherein the administering comprises delivery of a functional HLDGC gene that encodes the HLDGC protein, or a functional HLDGC protein to the epidermis or dermis of the subject.

65. The method of claim 62, wherein the administering comprises delivery of the composition to the epidermis or dermis of the subject.

66. The method of claim 56, 57, 58, 59, 61, or 62, wherein administering occurs daily, weekly, twice weekly, monthly, twice monthly, or yearly.

67. The method of claim 61, wherein the HLDGC gene or protein is CTLA-4, IL-2, IL-21, IL-2RA/CD25, IKZF4, a HLA Region residing gene, PTGER4, PRDX5, STX17, NKG2D, ULBP6, ULBP3, HDAC4, CACNA2D3, IL-13, IL-6, CHCHD3, CSMD1, IFNG, IL-26, KIAA0350 (CLEC16A), SOCS1, ANKRD12, or PTPN2.

68. The method of claim 67, wherein the HLA Region residing gene is selected from the group consisting of a gene of the HLA Class I Region, a gene of the HLA Class II Region, PTPN22, and AIRE.

69. The method of claim 68, wherein the HLA Class I Region gene is HLA-A, HLA-B, HLA-C, HLA-DQB1, HLA-DRB1, MICA, MICB, HLA-G, and NOTCH4.

70. The method of claim 68, wherein the HLA Class II Region gene is HLA-DOB, HLA-DQA1, HLA-DQA2, HLA-DQB2, TAP2, and HLA-DRA.

71. The method of claim 56, 57, 58, 59, 61, or 62, wherein the hair-loss disorder comprises androgenetic alopecia, telogen effluvium, alopecia areata, telogen effluvium, tinea capitis, alopecia totalis, hypotrichosis, hereditary hypotrichosis simplex, or alopecia universalis.

72. The method of claim 40, wherein the modulating compound comprises a fusion protein that specifically binds to a HLDGC protein or a fragment thereof.

73. The method of claim 72, wherein the fusion protein is directed to CTLA-4.

74. The method of claim 72, wherein the fusion protein is CTLA4-Ig.

75. The method of claim 74, wherein the fusion protein is abatacept.

76. A method for treating or preventing a hair-loss disorder in a mammalian subject in need thereof, the method comprising administering to the subject a therapeutic amount of a pharmaceutical composition comprising a fusion protein directed to an HLDGC protein, thereby treating or preventing a hair-loss disorder.

77. The method of claim 76, wherein the HLDGC protein is CTLA-4, IL-2, IL-21, IL-2RA/CD25, IKZF4, a HLA Region residing gene, PTGER4, PRDX5, STX17, NKG2D, ULBP6, ULBP3, HDAC4, CACNA2D3, IL-13, IL-6, CHCHD3, CSMD1, IFNG, IL-26, KIAA0350 (CLEC16A), SOCS1, ANKRD12, or PTPN2.

78. The method of claim 76, wherein the fusion protein is CTLA4-Ig.

79. The method of claim 78, wherein the fusion protein is abatacept.

80. The method of claim 76, wherein the hair-loss disorder comprises androgenetic alopecia, telogen effluvium, alopecia areata, telogen effluvium, tinea capitis, alopecia totalis, hypotrichosis, hereditary hypotrichosis simplex, or alopecia universalis.

81. A method for treating or preventing alopecia areata in a mammalian subject in need thereof, the method comprising administering to the subject a therapeutic amount of a pharmaceutical composition comprising CTLA4-Ig, thereby treating or preventing a hair-loss disorder.

82. The method of claim 81, wherein CTLA4-Ig is abatacept.

83. The method of claim 76 or 81, wherein the administering comprises a subcutaneous, intra-muscular, intra-peritoneal, or intravenous injection; an infusion; oral, nasal, or topical delivery; or a combination thereof.

84. The method of claim 76 or 81, wherein the administering comprises delivery of the composition to the epidermis or dermis of the subject.

85. The method of claim 84, wherein the epidermis or dermis is from the scalp.

86. The method of claim 76 or 81, wherein administering occurs daily, weekly, twice weekly, monthly, twice monthly, or yearly.

The application's sequence listing, which the Patent Office published only in electronic form, follows.

SEQUENCE LISTING (6170 sequences)

SEQ ID NO: 1 - protein, 223 aa, Homo sapiens
MACLGFQRHKAQLNLATRTWPCTLLFFLLFIPVFCKAMHVAQPAVVLASSRGIASFVCEYASPGKATEVRVTVLRQADSQVTEVCAATYMMGNELTFLDDSICTGTSSGNQVNLTIQGLRAMDTGLYICKVELMYPPPYYLGIGNGTQIYVIDPEPCPDSDFLLWILAAVSSGLFFYSFLLTAVSLSKMLKKRSPLTTGVYVKMPPTEPECEKQFQPYFIPIN

SEQ ID NO: 2 - DNA, 1988 bp, Homo sapiens
gccttctgtgtgtgcacatgtgtaatacatatctgggatcaaagctatctatataaagtccttgattctgtgtgggttcaaacacatttcaaagcttcaggatcctgaaaggttttgctctacttcctgaagacctgaacaccgctcccataaagccatggcttgccttggatttcagcggcacaaggctcagctgaacctggctaccaggacctggccctgcactctcctgttttttcttctcttcatccctgtcttctgcaaagcaatgcacgtggcccagcctgctgtggtactggccagcagccgaggcatcgccagctttgtgtgtgagtatgcatctccaggcaaagccactgaggtccgggtgacagtgcttcggcaggctgacagccaggtgactgaagtctgtgcggcaacctacatgatggggaatgagttgaccttcctagatgattccatctgcacgggcacctccagtggaaatcaagtgaacctcactatccaaggactgagggccatggacacgggactctacatctgcaaggtggagctcatgtacccaccgccatactacctgggcataggcaacggaacccagatttatgtaattgatccagaaccgtgcccagattctgacttcctcctctggatccttgcagcagttagttcggggttgtttttttatagctttctcctcacagctgtttctttgagcaaaatgctaaagaaaagaagccctcttacaacaggggtctatgtgaaaatgcccccaacagagccagaatgtgaaaagcaatttcagccttattttattcccatcaattgagaaaccattatgaagaagagagtccatatttcaatttccaagagctgaggcaattctaacttttttgctatccagctatttttatttgtttgtgcatttggggggaattcatctctctttaatataaagttggatgcggaacccaaattacgtgtactacaatttaaagcaaaggagtagaaagacagagctgggatgtttctgtcacatcagctccactttcagtgaaagcatcacttgggattaatatggggatgcagcattatgatgtgggtcaaggaattaagttagggaatggcacagcccaaagaaggaaaaggcagggagcgagggagaagactatattgtacacaccttatatttacgtatgagacgtttatagccgaaatgatcttttcaagttaaattttatgccttttatttcttaaacaaatgtatgattacatcaaggcttcaaaaatactcacatggctatgttttagccagtgatgctaaaggttgtattgcatatatacatatatatatatatatatatatatatatatatatatatatatatatatatatatattttaatttgatagtattgtgcatagagccacgtatgtttttgtgtatttgttaatggtttgaatataaacactatatggcagtgtctttccaccttgggtcccagggaagttttgtggaggagctcaggacactaatacaccaggtagaacacaaggtcatttgctaactagcttggaaactggatgaggtcatagcagtgcttgattgcgtggaattgtgctgagttggtgttgacatgtgctttggggcttttacaccagttcctttcaatggtttgcaaggaagccacagctggtggtatctgagttgacttgacagaacactgtcttgaagacaatggcttactccaggagacccacaggtatgaccttctaggaagctccagttcgatgggcccaattcttacaaacatgtggttaatgccatggacagaagaaggcagcaggtggcagaatggggtgcatgaaggtttctgaaaattaacactgcttgtgtttttaactcaatattttccatgaaaatgcaacaacatgtataatatttttaattaaataaaaatctgtggtggtcgttttaaaaaaaaaaa

SEQ ID NO: 3 - protein, 153 aa, Homo sapiens
MYRMQLLSCIALSLALVTNSAPTSSSTKKTQLQLEHLLLDLQMILNGINNYKNPKLTRMLTFKFYMPKKATELKHLQCLEEELKPLEEVLNLAQSKNFHLRPRDLISNINVIVLELKGSETTFMCEYADETATIVEFLNRWITFCQSIISTLT

SEQ ID NO: 4 - DNA, 822 bp, Homo sapiens
agttccctatcactctctttaatcactactcacagtaacctcaactcctgccacaatgtacaggatgcaactcctgtcttgcattgcactaagtcttgcacttgtcacaaacagtgcacctacttcaagttctacaaagaaaacacagctacaactggagcatttactgctggatttacagatgattttgaatggaattaataattacaagaatcccaaactcaccaggatgctcacatttaagttttacatgcccaagaaggccacagaactgaaacatcttcagtgtctagaagaagaactcaaacctctggaggaagtgctaaatttagctcaaagcaaaaactttcacttaagacccagggacttaatcagcaatatcaacgtaatagttctggaactaaagggatctgaaacaacattcatgtgtgaatatgctgatgagacagcaaccattgtagaatttctgaacagatggattaccttttgtcaaagcatcatctcaacactgacttgataattaagtgcttcccacttaaaacatatcaggccttctatttatttaaatatttaaattttatatttattgttgaatgtatggtttgctacctattgtaactattattcttaatcttaaaactataaatatggatcttttatgattctttttgtaagccctaggggctctaaaatggtttcacttatttatcccaaaatatttattattatgttgaatgttaaatatagtatctatgtagattggttagtaaaactatttaataaatttgataaatataaaaaaaaaaaaaaaaaaaaaaaaaa

SEQ ID NO: 5 - protein, 272 aa, Homo sapiens
MDSYLLMWGLLTFIMVPGCQAELCDDDPPEIPHATFKAMAYKEGTMLNCECKRGFRRIKSGSLYMLCTGNSSHSSWDNQCQCTSSATRNTTKQVTPQPEEQKERKTTEMQSPMQPVDQASLPGHCREPPPWENEATERIYHFVVGQMVYYQCVQGYRALHRGPAESVCKMTHGKTRWTQPQLICTGEMETSQFPGEEKPQASPEGRPESETSCLVTTTDFQIQTEMAATMETSIFTTEYQVAVAGCVFLLISVLLLSGLTWQRRQRKSRRTI

SEQ ID NO: 6 - DNA, 2308 bp, Homo sapiens
gagagactggatggacccacaagggtgacagcccaggcggaccgatcttcccatcccacatcctccggcgcgatgccaaaaagaggctgacggcaactgggccttctgcagagaaagacctccgcttcactgccccggctggtcccaagggtcaggaagatggattcatacctgctgatgtggggactgctcacgttcatcatggtgcctggctgccaggcagagctctgtgacgatgacccgccagagatcccacacgccacattcaaagccatggcctacaaggaaggaaccatgttgaactgtgaatgcaagagaggtttccgcagaataaaaagcgggtcactctatatgctctgtacaggaaactctagccactcgtcctgggacaaccaatgtcaatgcacaagctctgccactcggaacacaacgaaacaagtgacacctcaacctgaagaacagaaagaaaggaaaaccacagaaatgcaaagtccaatgcagccagtggaccaagcgagccttccaggtcactgcagggaacctccaccatgggaaaatgaagccacagagagaatttatcatttcgtggtggggcagatggtttattatcagtgcgtccagggatacagggctctacacagaggtcctgctgagagcgtctgcaaaatgacccacgggaagacaaggtggacccagccccagctcatatgcacaggtgaaatggagaccagtcagtttccaggtgaagagaagcctcaggcaagccccgaaggccgtcctgagagtgagacttcctgcctcgtcacaacaacagattttcaaatacagacagaaatggctgcaaccatggagacgtccatatttacaacagagtaccaggtagcagtggccggctgtgttttcctgctgatcagcgtcctcctcctgagtgggctcacctggcagcggagacagaggaagagtagaagaacaatctagaaaaccaaaagaacaagaatttcttggtaagaagccgggaacagacaacagaagtcatgaagcccaagtgaaatcaaaggtgctaaatggtcgcccaggagacatccgttgtgcttgcctgcgttttggaagctctgaagtcacatcacaggacacggggcagtggcaaccttgtctctatgccagctcagtcccatcagagagcgagcgctacccacttctaaatagcaatttcgccgttgaagaggaagggcaaaaccactagaactctccatcttattttcatgtatatgtgttcattaaagcatgaatggtatggaactctctccaccctatatgtagtataaagaaaagtaggtttacattcatctcattccaacttcccagttcaggagtcccaaggaaagccccagcactaacgtaaatacacaacacacacactctaccctatacaactggacattgtctgcgtggttcctttctcagccgcttctgactgctgattctcccgttcacgttgcctaataaacatccttcaagaactctgggctgctacccagaaatcattttacccttggctcaatcctctaagctaacccccttctactgagccttcagtcttgaatttctaaaaaacagaggccatggcagaataatctttgggtaacttcaaaacggggcagccaaacccatgaggcaatgtcaggaacagaaggatgaatgaggtcccaggcagagaatcatacttagcaaagttttacctgtgcgttactaattggcctctttaagagttagtttctttgggattgctatgaatgataccctgaatttggcctgcactaatttgatgtttacaggtggacacacaaggtgcaaatcaatgcgtacgtttcctgagaagtgtctaaaaacaccaaaaagggatccgtacattcaatgtttatgcaaggaaggaaagaaagaaggaagtgaagagggagaagggatggaggtcacactggtagaacgtaaccacggaaaagagcgcatcaggcctggcacggtggctcaggcctataaccccagctccctaggagaccaaggcgggagcatctcttgaggccaggagtttgagaccagcctgggcagcatagcaagacacatccctacaaaaaattagaaattggctggatgtggtggcatacgcctgtagtcctagccactcaggaggctgaggcaggaggattgcttgagcccaggagttcgaggctgcagtcagtcatgatggcaccactgcactccagcctgggcaacagagcaagatcctgtctttaaggaaaaaaagacaagg

SEQ ID NO: 7 - protein, 585 aa, Homo sapiens
MHTPPALPRRFQGGGRVRTPGSHRQGKDNLERDPSGGCVPDFLPQAQDSNHFIMESLFCESSGDSSLEKEFLGAPVGPSVSTPNSQHSSPSRSLSANSIKVEMYSDEESSRLLGPDERLLEKDDSVIVEDSLSEPLGYCDGSGPEPHSPGGIRLPNGKLKCDVCGMVCIGPNVLMVHKRSHTGERPFHCNQCGASFTQKGNLLRHIKLHSGEKPFKCPFCNYACRRRDALTGHLRTHSVSSPTVGKPYKCNYCGRSYKQQSTLEEHKERCHNYLQSLSTEAQALAGQPGDEIRDLEMVPDSMLHSSSERPTFIDRLANSLTKRKRSTPQKFVGEKQMRFSLSDLPYDVNSGGYEKDVELVAHHSLEPGFGSSLAFVGAEHLRPLRLPPTNCISELTPVISSVYTQMQPLPGRLELPGSREAGEGPEDLADGGPLLYRPRGPLTDPGASPSNGCQDSTDTESNHEDRVAGVVSLPQGPPPQPPPTIVVGRHSPAYAKEDPKPQEGLLRGTPGPSKEVLRVVGESGEPVKAFKCEHCRILFLDHVMFTIHMGCHGFRDPFECNICGYHSQDRYEFSSHIVRGEHKVG

SEQ ID NO: 8 - DNA, 5506 bp, Homo sapiens
gaagctgtccgtgtcctgggccccatgacctctggggccttggcttccccagctggcagaggattgggccttccctagggccccccctttctccctcccacccgcaggcccatccatctctctctctctctcttgcacacactcttgcctctctcaggcatttgttgtgcagttcctctttgtctgctgggcacgaggggcaacagcatctgcctttccctccctgtgcacacacccaccacccacccccttcactgtcttggaaaagggatgctgtagcctagcatctcccccactatatacacatatacattctctccagccccctccccaagcacatccaagcgtgctctcccctctccttctctccctctctctctctctctctctcacacacacacacacacacacactcaacacacatacaccctgggctgagctgctcttgctggctgcagccgtgggcctctgctcaccgtgccgctgctgctgcctgcgaaatgacggcggttcccctcacttccaggaatccacgcttcctggaaggtgagtggctgggctcacccctgcctgccactgagacgcagacatgcatacaccacccgcactccctcgccgtttccaaggcggcggccgcgttcgcaccccagggtctcaccggcaagggaaggataatctggagagggatccctcaggagggtgtgttccggatttcttgcctcaggcccaagactccaaccattttataatggaatctttattttgtgaaagtagcggggactcatctctggagaaggagttcctcggggccccagtggggccctcggtgagcacccccaacagccagcactcttctcctagccgctcactcagtgccaactccatcaaggtggagatgtacagcgatgaggagtcaagcagactgctggggccagatgagcggctcctggaaaaggacgacagcgtgattgtggaagattcattgtctgagcccctgggctactgtgatgggagtgggccagagcctcactcccctgggggcatccggctgcccaatggcaagctcaagtgtgacgtctgcggcatggtctgtattggacccaacgtgctcatggtgcacaagcgcagtcacactggtgaaaggcccttccattgcaaccagtgtggtgcctccttcacccagaaggggaacctgctgcgccacatcaagctgcactctggggagaagccctttaaatgtcccttctgcaactatgcctgccgccggcgtgatgcactcactggtcacctccgcacacactcagtctcctctcccacagtgggcaagccctacaagtgtaactactgtggccggagctacaaacagcagagtaccctggaggagcacaaggagcggtgccataactacctacagagtctcagcactgaagcccaagctttggctggccaaccaggtgacgaaatacgtgacctggagatggtgccagactccatgctgcactcatcctctgagcggccaactttcatcgatcgtctggccaatagcctcaccaaacgcaagcgttccacaccccagaagtttgtaggcgaaaagcagatgcgcttcagcctctcagacctcccctatgatgtgaactcgggtggctatgaaaaggatgtggagttggtggcacaccacagcctagagcctggctttggaagttccctggcctttgtgggtgcagagcatctgcgtcccctccgccttccacccaccaattgcatctcagaactcacgcctgtcatcagctctgtctacacccagatgcagcccctccctggtcgactggagcttccaggatcccgagaagcaggtgagggacctgaggacctggctgatggaggtcccctcctctaccggccccgaggccccctgactgaccctggggcatcccccagcaatggctgccaggactccacagacacagaaagcaaccacgaagatcgggttgcgggggtggtatccctccctcagggtcccccaccccagccacctcccaccattgtggtgggccggcacagtcctgcctacgccaaagaggaccccaagccacaggaggggttattgcggggcaccccaggcccctccaaggaagtgcttcgggtggtgggcgagagtggtgagcctgtgaaggccttcaagtgtgagcactgccgtatcctcttcctggaccacgtcatgttcactatccacatgggctgccatggcttcagagacccttttgagtgcaacatctgtggttatcacagccaggaccggtacgaattctcttcccacattgtccggggggagcataaggtgggctagcaacctctccctctctcctcagtccaccactccactgccctgactacaggcattgatccctgtccccaccatttcccaaggagttttgctttgtagccctcactactggccacctgacctcacacctgaccctgacccctcctcacctattctcttcctctatcctgaccgatgtaagcattgtgatgaaacagatcttttgcttatgtttttcctttttatcttctctcatcccagcatactgagttatttattaattagttgatttatttttgcctttttaaattttaacttatatcagtcacttgccactcccccaccctcctgtccacaactcctttccactttaggccaatttttctctcttagatcttccagcagccccaggggtaggaagctcctcttagtactaagagacttcaagcttcttgctttaagtcctcaccctttacattatctaattcttcagttttgatgctgatacctgcccccggccctaccttagctctgtggcattatatctcctctctgggactcttcaacctggtactccatacctcttgtgccctctcactttaggcagcttgcactattcttgaatgaatgaagaattatttcctcatttggaagtaggagggactgaagaaattctccccaggcactgtgggactgagagtcctattcccctagtaataggtcatattcccctagtaatatgagttctcaaagcctacattcaggatctccctctaggatgtgatagatctggtccctctccttgaactacccctccacacgctctagtcccttcaacctaccggtctattaagtggtggcttttctctccttggagtgccccaattttatattctcaggggccaaggctaggtctgcaaccctctgtctctgacagattgggagccacaggtgcctaattgggaaccagggcatgggaaaggagtgggtcaaaattcttctctttctcctccacctctcaaacttcttcactatagtgaccttcctaggctctcaggggctccttcagtccccatcctatgagaaactagtgggttgctgcctgatgacaaggggttgtttcagcccctcagtcatgctgccttctgctgctccctcccagcaggattcaccctctcattcccgggctcctgggccctgttcttaggatcagtggcagggagaaacgggtatctcttttctctcttctaattttcagtataaccaaaaattatcccagcatgagcacgggcacgtgcccttcaccccattccacccttgttccagcaagactgggatgggtacaactgaactggggtcttcctttactacccccttctacactcagctcccagacacagggtaggaggggggactgctggctactgcagagacccttggctatttgagtaacctaggattagtgagaaggggcagaaggagatacaactccactgcaagtggaggtttctttctacaagagttttctgcccaaggccacagccatcccactctctgcttccttgagattcaaaccaaaggctgtttttctatgtttaaagaaaaaaaaaagtaaaaaccaaacacaacacctcacaagttgtaactcttggtccttctctctctccttttctcttcccttccttccccttccatctttctttccacatgtcctttccttattggctcttttacctcctacttttctcactccctatcagggatattttggggggggatggtaaagggtgggctaaggaacagaccctgggattagggccttaagggctctgagaggagtctaccttgccttcttatgggaagggagaccctaaaaaactttctcctctttgtcctcctttttctcccccactctgaggtttccccaagagaaccagattggcagggagaagcattgtggggcaattgttcctccttgacaatgtagcaataaatagatgctgccaagggcagaaaatggggaggttagctcagagcagagtagtctctagagaaaggaagaatcctcaacggcaccctggggtgctagctcctttttagaatgtcagcagagctgagattaatatctgggcttttcctgaactattctggttattgagcccttcctgttagacctaccgcctcccacctcttctgtgtctgctgtgtatttggtgacacttcataaggactagtcccttctggggtatcagagccttagggtgcccccatccccttccccagtcaactgtggcacctgtaacctcccggaacatgaaggactatgctctgaggctatactctgtgcccatgagagcagagactggaagggcaagaccaggtgctaaggaggggagagggggcatcctgtctctctccagaccatcactgcactttaaccagggtcttaggtacaaaatcctacttttcagagccttccagctctggaacctcaaacatcctcatgctctctcccagctccttttgcataaaaaaaaaagtaaagaaaaagaaaaaaaaatacacacacactgaaacccacatggagaaaagaggtgtttccttttatattgctattcaaaatcaataccaccaacaaaatatttctaagtagacacttttccagacctttgtttttttgtgtcagtgtccaagctgcagataggattttgtaatacttctggcagcttctttccttgtgtacataatatatatatatacatatatatatatatttttaatcagaagttatgaagaacaaaaagaaaaaataaacacagaagcaagtgcaataccacctctcttctccctctctcctagggtttcctttgtagcctatgtttggtgtctcttttgacctttaccccttcacctcctcctctcttcttctgattcccctcccccccttttttaaagagtttttctcctttctcaaggggagttaaactagcttttgagacttattgcaaagcattttgtatatgtaatatattgtaagtaaatatttgtgtaacggagatatactactgtaagttttgtactgtactggctgaaagtctgttataaataaacatgagtaatttaacaccaaaaaaaaaaaaaaaaaaaaaaaaaaaaaaaaaaaaaaaaaaaaaaaaaaaaaaa

SEQ ID NO: 9 - protein, 488 aa, Homo sapiens
MSTPGVNSSASLSPDRLNSPVTIPAVMFIFGVVGNLVAIVVLCKSRKEQKETTFYTLVCGLAVTDLLGTLLVSPVTIATYMKGQWPGGQPLCEYSTFILLFFSLSGLSIICAMSVERYLAINHAYFYSHYVDKRLAGLTLFAVYASNVLFCALPNMGLGSSRLQYPDTWCFIDWTTNVTAHAAYSYMYAGFSSFLILATVLCNVLVCGALLRMHRQFMRRTSLGTEQHHAAAAASVASRGHPAASPALPRLSDFRRRRSFRRIAGAEIQMVILLIATSLVVLICSIPLVVRVFVNQLYQPSLEREVSKNPDLQAIRIASVNPILDPWIYILLRKTVLSKAIEKIKCLFCRIGGSRRERSGQHCSDSQRTSSAMSGHSRSFISRELKEISSTSQTLLPDLSLPDLSENGLGGRNLLPGVPGMGLAQEDTTSLRTLRISETSDSSQGQDSESVLLVDEAGGSGRAGPAPKGSSLQVTFPSETLNLSEKCI

SEQ ID NO: 10 - DNA, 3432 bp, Homo sapiens
gcgagagcggagctccaagcccggcagcccgagaggaagatgaacagccccaggccagagcctctggcagagtggaccccgagccgcccccaggtagccaggagcggcctcagcggcagccgcaaactccagtagccgcccgtgctgcccgtggctggggcggagggcagccagagctggggaccaaggctccgcgccacctgcgcgcacagcctcacacctgaacgctgtcctcccgcagacgagaccggcgggcactgcaaagctgggactcgtctttgaaggaaaaaaaatagcgagtaagaaatccagcaccattcttcactgacccatcccgctgcacctcttgtttcccaagtttttgaaagctggcaactctgacctcggtgtccaaaaatcgacagccactgagaccggctttgagaagccgaagatttggcagtttccagactgagcaggacaaggtgaaagcaggttggaggcgggtccaggacatctgagggctgaccctgggggctcgtgaggctgccaccgctgctgccgctacagacccagccttgcactccaaggctgcgcaccgccagccactatcatgtccactcccggggtcaattcgtccgcctccttgagccccgaccggctgaacagcccagtgaccatcccggcggtgatgttcatcttcggggtggtgggcaacctggtggccatcgtggtgctgtgcaagtcgcgcaaggagcagaaggagacgaccttctacacgctggtatgtgggctggctgtcaccgacctgttgggcactttgttggtgagcccggtgaccatcgccacgtacatgaagggccaatggcccgggggccagccgctgtgcgagtacagcaccttcattctgctcttcttcagcctgtccggcctcagcatcatctgcgccatgagtgtcgagcgctacctggccatcaaccatgcctatttctacagccactacgtggacaagcgattggcgggcctcacgctctttgcagtctatgcgtccaacgtgctcttttgcgcgctgcccaacatgggtctcggtagctcgcggctgcagtacccagacacctggtgcttcatcgactggaccaccaacgtgacggcgcacgccgcctactcctacatgtacgcgggcttcagctccttcctcattctcgccaccgtcctctgcaacgtgcttgtgtgcggcgcgctgctccgcatgcaccgccagttcatgcgccgcacctcgctgggcaccgagcagcaccacgcggccgcggccgcctcggttgcctcccggggccaccccgctgcctccccagccttgccgcgcctcagcgactttcggcgccgccggagcttccgccgcatcgcgggcgccgagatccagatggtcatcttactcattgccacctccctggtggtgctcatctgctccatcccgctcgtggtgcgagtattcgtcaaccagttatatcagccaagtttggagcgagaagtcagtaaaaatccagatttgcaggccatccgaattgcttctgtgaaccccatcctagacccctggatatatatcctcctgagaaagacagtgctcagtaaagcaatagagaagatcaaatgcctcttctgccgcattggcgggtcccgcagggagcgctccggacagcactgctcagacagtcaaaggacatcttctgccatgtcaggccactctcgctccttcatctcccgggagctgaaggagatcagcagtacatctcagaccctcctgccagacctctcactgccagacctcagtgaaaatggccttggaggcaggaatttgcttccaggtgtgcctggcatgggcctggcccaggaagacaccacctcactgaggactttgcgaatatcagagacctcagactcttcacagggtcaggactcagagagtgtcttactggtggatgaggctggtgggagcggcagggctgggcctgcccctaaggggagctccctgcaagtcacatttcccagtgaaacactgaacttatcagaaaaatgtatataataggcaaggaaagaaatacagtactgtttctggacccttataaaatcctgtgcaatagacacatacatgtcacatttagctgtgctcagaagggctatcatcatcctacaactcacattagagaacatcctggcttttgagcacttttcaaacaatcaagttgactcacgtgggtcctgaggcctgcagcacgtcggatgctaccccactatgacagaggattgtggtcacaacttgatggctgcgaagacctaccctccgtttttctactagataggaggatggtagaagtttggctgctgtcataacatccagagctttgtcgtatttggcacacagcagaggcccagatattagaaaggctctattccaataaactatgaggactgccttatggatgatttaagtgtctcactaaagcatgaaatgtgaatttttattgttgtacatacgatttaaggtatttaaagtattttcttctctgtgagaaggtttattgttaatacaaggtataataaaattatcgcaacccctctccttccagtataaccagctgaagttgcagatgttagatatttttcataaacaagttcgagtcaaagttgaaaattcatagtaagattgatatctataaaatagatataaatttttaagagaaagaatttagtattatcaaagggataaagaaaaaaatactatttaagatgtgaaaattacagtccaaaatactgttctttccaggctatgtataaaatacatagtgaaaattgtttagtgatattacatttatttatccagaaaactgtgatttcaggagaacctaacatgctggtgaatattttcaactttttccctcactaattggtacttttaaaaacataacataaattttttgaagtctttaataaataacccataattgaagtgtataatataaaaaattttaaaaatctaagcagcttattgtttctctgaaagtgtgtgtagttttactttcctaaggaattaccaagaatatcctttaaaatttaaaaggatggcaagttgcatcagaaagctttattttgagatgtaaaaagattcccaaacgtggttacattagccattcatgtatgtcagaagtgcagaattggggcacttaatggtcaccttgtaacagttttgtgtaactcccagtgatgctgtacacatatttgaagggtctttctcaaagaaatattaagcatgttttgttgctcagtgtttttgtgaattgcttggttgtaattaaattctgagcctgatattgatatggttttaagaagcagttgtaccaagtgaaattattttggagattataataaatatatacattcaaaaaaaaaaaaaaaaaa

SEQ ID NO: 11 - protein, 214 aa, Homo sapiens
MGLAGVCALRRSAGYILVGGAGGQSAAAAARRCSEGEWASGGVRSFSRAAAAMAPIKVGDAIPAVEVFEGEPGNKVNLAELFKGKKGVLFGVPGAFTPGCSKTHLPGFVEQAEALKAKGVQVVACLSVNDAFVTGEWGRAHKAEGKVRLLADPTGAFGKETDLLLDDSLVSIFGNRRLKRFSMVVQDGIVKALNVEPDGTGLTCSLAPNIISQL

SEQ ID NO: 12 - DNA, 959 bp, Homo sapiens
gcagtggaggcggcccaggcccgccttccgcagggtgtcgccgctgtgccgctagcggtgccccgcctgctgcggtggcaccagccaggaggcggagtggaagtggccgtggggcgggtatgggactagctggcgtgtgcgccctgagacgctcagcgggctatatactcgtcggtggggccggcggtcagtctgcggcagcggcagcaagacggtgcagtgaaggagagtgggcgtctggcggggtccgcagtttcagcagagccgctgcagccatggccccaatcaaggtgggagatgccatcccagcagtggaggtgtttgaaggggagccagggaacaaggtgaacctggcagagctgttcaagggcaagaagggtgtgctgtttggagttcctggggccttcacccctggatgttccaagacacacctgccagggtttgtggagcaggctgaggctctgaaggccaagggagtccaggtggtggcctgtctgagtgttaatgatgcctttgtgactggcgagtggggccgagcccacaaggcggaaggcaaggttcggctcctggctgatcccactggggcctttgggaaggagacagacttattactagatgattcgctggtgtccatctttgggaatcgacgtctcaagaggttctccatggtggtacaggatggcatagtgaaggccctgaatgtggaaccagatggcacaggcctcacctgcagcctggcacccaatatcatctcacagctctgaggccctgggccagattacttcctccacccctccctatctcacctgcccagccctgtgctggggccctgcaattggaatgttggccagatttctgcaataaacacttgtggtttgcggccaaaaaaaaaaaaaaaaaaaaaaaaaaaaaaaaaaaaaaaaaaaaaaaaaaaaaaaaaaaaaaaaaaaaaaaaaaaa

SEQ ID NO: 13 - protein, 302 aa, Homo sapiens
MSEDEEKVKLRRLEPAIQKFIKIVIPTDLERLRKHQINIEKYQRCRIWDKLHEEHINAGRTVQQLRSNIREIEKLCLKVRKDDLVLLKRMIDPVKEEASAATAEFLQLHLESVEELKKQFNDEETLLQPPLTRSMTVGGAFHTTEAEASSQSLTQIYALPEIPQDQNAAESWETLEADLIELSQLVTDFSLLVNSQQEKIDSIADHVNSAAVNVEEGTKNLGKAAKYKLAALPVAGALIGGMVGGPIGLLAGFKVAGIAAALGGGVLGFTGGKLIQRKKQKMMEKLTSSCPDLPSQTDKKCS

SEQ ID NO: 14 - DNA, 6910 bp, Homo sapiens
ctcgtgatgccccgccccgtcgctcctgcgcctgcgccgtgcccaccgaccggcctcgagcgccccggcgggaggtttttctatatgagtggagaagacagctgttaccagggaggtcatacaacatttttttaggatgtctgaagatgaagaaaaagtgaaattacgccgtcttgaaccagctatccagaaattcattaagatagtaatcccaacagacctggaaaggttaagaaagcaccagataaatattgagaagtatcaaaggtgcagaatctgggacaagttgcatgaagagcatatcaatgcaggacgtacagttcagcaactccgatccaatatccgagaaattgagaaactttgtttgaaagtccgaaaggatgacctagtacttctgaagagaatgatagatcctgttaaagaagaagcatcagcagcaacagcagaatttctccaactccatttggaatctgtagaagaacttaagaagcaatttaatgatgaagaaactttgctacagcctcctttgaccagatccatgactgttggtggagcatttcatactactgaagctgaagctagttctcagagtttgactcagatatatgccttacctgaaattcctcaagatcaaaatgctgcagaatcgtgggaaaccttagaagcggacttaattgaacttagccaactggtcactgacttctctctcctagtgaattctcagcaggagaagattgacagcattgcagaccatgtcaacagtgctgctgtgaatgttgaagagggaaccaaaaacttagggaaggctgcaaaatacaagctggcagctctgcctgtggcaggtgcactcatcgggggaatggtagggggtcctattggcctccttgcaggcttcaaagtggcaggaattgcagctgcacttggtggtggggtgttgggcttcacaggtggaaaattgatacaaagaaagaaacagaaaatgatggagaagctcacttccagctgtccagatcttcccagccaaactgacaagaaatgcagttaaaaaccaaatttcagtattattggtgccaacatgtctatcctgaggacctttgctgctgttggacactccgtcaccttttggaacacaagtatatcaagatagtggctactgatgttcaagtgggattgaagtgtgataaatggatatattttgttgtttgctggggtgttcatggagatgttaagagattgaggccctgggctgagggtatataatgtatgtcaggtaaagtttgaagactgccaaggagcagattttctccctggaaatgtgaaaactgaacctataactctgataaggacttgagatgtgtagaaacgttgggttatggaagactagtttcttccataaccctgaattggagaccttaatgctaagtgtagattattgaggtttgttagtgaggaaaagaataagagttcagaagcctttgttatcagatagcgaaatcagggcctagtgaggagcacaggtcgactacataatggagtccattggcgaaccctattgcaatttggtccaactatatcttctggtgaaggaaattaatgatgtaagaaaatgcaagaggctcaacttctcttccaaaaatcttctggcttctgaactcttcctctgcctctctttaaataaataacacagaatttcaagtggtaggagacttattaagccagtcaccaagcttggtctgtcagcctgtcttctaacacctcaaagatcttgtgccctgtgctgtccctcccttgtaattatgaaaagttctttggtttctggggtgaattctacccatgtataatgaggaattctctcataaccttttttgtcttgtctgtcatctctgttcatcccttcctataacctctaggtaaaaagaaaagaaaaaaagaaatttcgagatattttcaacattgttagagtttgggctaaaatgagcaaggagaaaaaaaccaccaagaacatttcctggggcatgttccagttttgaggggtgatatatctgccagatagggggtatctgacccagtcttcttttcagctggtctctggggggagctgagaactcgcttgctacctcacatccttttccccagactttttatctcctatgcatccctttgctttctatagctggtgtttcttccccaaaatggcgttcccatgcttacctttctcacattctagacaatgatggacaaagacgcatgcaagactcagacccggggaatggtgtggtgctaatctcaacacctgacattcacagcaagcatggcccagcccaactgcatgtctatctcaaaccgcagaaaggctttaatactggaaaaaaagaattcaagactacaggcagctcccctctgtaccccaactcatttaaaataggaggaatcactttttgccttacttaacgcttttttctgagcacagggatgggcacctgcaccccagaaggtgtgagctgtctctctgccaggagctaaggttcattaggggattggatggtttatcacttctttctttctgagtttacttttagtaacttttattgatggctacctttcatgtccctgtctaaagagactttctctttcatacgtcttaaatctcatcaatgaaatccagtgaaacagcaccatttcttagtatcattaaataactagaaagtatcaagtattgctctctgctgctttatatcattaacatattaataataccaagaaggaaatactttgaataagtgtcagattctgatccagtattggacacctgtgatattggacacctgtgaggctgggataattacttttgaattacacctcttctctagtttctggaccttgctctgtcactttaacacagggtgatcaaacctgaatgaggatcagaactcacccaggcacatactaaagcaagattcctaaacctcagttccaggggtaattctgacatcacccgtccagcatagtcagctgaaattataaatctaagaaacagttacatcaagattctgctgtgtcatttaattctgaaactcccagtattctacccttcttcatcactgcatattaccccactcttccatcccaaattggctatcctttcagcccaccaacttagcggcagcactagggattcattataaggtaaatctggtttacataaagacctgaaggaggcctgtatttgaagctcacacttggtattggtatctctcatttttactgagccagtgtggaataccactgtatgtactcatataagcccttgacttttactgctcatcaggattggaatattactctagcagtcttcacacataggcaagttacagtccttttaaaaagtatctcatttccctataatggaacctaatagccaactttttcatagaaattgctagaagagtttgatcaactataaatgataaagtgtttataagcatagtcagtgtgacacagaaaccaatcttaaaattgaatttaatgttttatcatatcagattaaatattttctccatgtcttatttttactgcaacaagttagaaagtgggaacactttgattaatgtcttaaaatttgtgggccctcatttggataaaggcagcaatcctaaggactttttttttttttttaacataatctgagaatttctctgtagagcagagactttcaaaccttttggctgtaacccacagtaaaaaacgcatttatatcaaaccttagaatatgtttaatgaacaatacttaccattctgatgctttttattgtttcagtttttaaaatatgccagttgcaacccactaaattgatatctaccaatgggttgcaacccttagcttgaaaaaaacaccctcacagaggaactggtatttcttgaataccttctgtttgccaggcacttcaccaggcattttacaagtaaggaaactgggcttcagagaaaataatttgcagaggtttactcaactacaaaggggtgaagccaggaatgttaactaggtctgttgagctacaaaaacttttatgtctctcagactatacagcctctatacaaaattgagatgggggttgggggcaggggctcatgcctgcaatcccagcacttagggaggcagaggccagaggatcacttgagcccaggagtttgagaccagcctgggcaacatagtgagactcttgtctgtatgaaaaaaattaagaattagctgggtgtggcatagcacacacctgtggtcccagctacatgggaagctgaagtgggaggatcacttgaactcaggagcagccttggtgacagaacaagaccctctctcaaaaaaatatttaaaaaaaggtgggtcatccattctcctttaccaaacaggctttgaaatgacacattccattcatttgcatctttttaaaaaacttctgattccttactgagtgtccagcagcctcaaagtttttaatggtagctgatgcagacataaacagtgctcaatttggcccttaaactataaaatcaagaaagagtatttcaatcccatccacctgcctgcaagatttcttaatgttcactagttataaccattgtttaaacagtgctttttgtgtaatttaaaaataaactttaatgctttttaaaacaaatttatcataattcatagatcaaatgattatcctttaaaatgatacccttgggaaatcatgtacttactgtagtgatgctagtattaatattacttagaccaattttgaaactgttctttcagaattgcctccaaagacattttgcagatcatcccagaaaagggggtatgatggtgctgtgtagaactgaccagagttcctggaggattttgaggttatactgaaactgagtgctgtacagggagaattgcatgagtccagaaacttccttctgtgggctgcctgccttcctgccctcccttaagtgctctaagatttttgtacaggagtaagaatcaaatactggtaacatcaatcacaagaagttgaggaaacctgtaatatagctagataatatacaacgtttgtcttccatcagagtgcagaaaccaaaccatgctttgtgttaaccttaaatatgaaaggtgtttctcagggtcccctttgtccttcgttgctgccatatgaaatcttacaaggaaggatgaggaaaagcctggggggaggttctcctcggaaatgaggtggttttttttgttattaagtagaacgtggctgtggttcacaggtacttaacgaatgttagatgatgttcttaagtaatcagaggcctaataaaaggcaggggagtttctcttctagcctaaattaatattaaaagttcaggggtattttttgtttttaaattaatactttattgtttttaacaggtggttctcataatttacattcattaatttgatgcccttttacaaagaaacttcttaggtattataaaccatcaatgtaaaggatccacatggtatgtatccacattgctactctcaaatagaaatgggagataagaaatatatctgtgcaatattaaattgaaaaaaaaaaacccataaaaagtgtcaaaggcaaataatttgctctagatcacaaaactagttagcacaaggctaggattataaccagggtctaggaaaaaatcctgaaggtgatttaactgagtgttaggccctgtcaagccacctgctaaggctcatggtctttcagactagcttcaacattccaaatcaggcaatagctacaacggaaagataattggacggggaatcctgagatcagagtcctagtttggctttgtctcttgtagcaggattttttaaatcaggggcagctctcttctcccatcccagccatgaatctttcaaccttagtggtcaccaacttgactccattccttatatcaagacttgtcctgtcaattctcccttaaatgttagttgcatccatttctaaatatatccatggccatcaccctagtaaaaagactattacctcacaccccgcacttgatcttcccccaactttaagtgactcagttccttatatcactgccacaagaattaacaaccatgtccatctttcatttttctgctgaaagattttcagtggttcccactgaataccaaataaagttcgaatcccttagattggcattcacagccttctacgttctggccccagctttatctcttgaaactcactactcaccatctgacaatgccactaaaaatccacaagagtgattttaaggtttttctatggtgaaggttcaaactggtaataaaccatgtttacatttttctggtctaaaataatttctatattactttataatagtcagctgggggttatttaagctcttggacgagcctaaaacttgtatcctgaagaaaatatttttttccaccagaagaaattgctttcaatttcttaaccttcaaaacaatgtcagtgttgtcacctgtgcatttgatagccacagcacaagtattcttcaggagcataaatcctccagccttgaatggaccattgtccagctcctgtgaaaaacttaatatttgagaaagacattcaatggtacatgttttctgtacacttcatgagtagttgagattttcttgtattaaggttaatcactaaaaaggtgtttacttgggtttcgttaactaaaccccctaaagatgttttccattttattgttaaacacttggtgttagcaagggtcagcacgagaaaaggcccaatggcaagaatttctgcaaactctgtaaagcttactgaattcatttgtcatttattacattgctgagtggtgcttgaataaggaaacatgcaataaatttacttatttaaccaacaaa

SEQ ID NO: 15 - protein, 216 aa, Homo sapiens
MGWIRGRRSRHSWEMSEFHNYNLDLKKSDFSTRWQKQRCPVVKSKCRENASPFFFCCFIAVAMGIRFIIMVTIWSAVFLNSLFNQEVQIPLTESYCGPCPKNWICYKNNCYQFFDESKNWYESQASCMSQNASLLKVYSKEDQDLLKLVKSYHWMGLVHIPTNGSWQWEDGSILSPNLLTIIEMQKGDCALYASSFKGYIENCSTPNTYICMQRTV

SEQ ID NO: 16 - DNA, 1593 bp, Homo sapiens
actttcaattctagatcaggaactgaggacatatctaaattttctagttttatagaaggcttttatccacaagaatcaagatcttccctctctgagcaggaatcctttgtgcattgaagactttagattcctctctgcggtagacgtgcacttataagtatttgatggggtggattcgtggtcggaggtctcgacacagctgggagatgagtgaatttcataattataacttggatctgaagaagagtgatttttcaacacgatggcaaaagcaaagatgtccagtagtcaaaagcaaatgtagagaaaatgcatctccattttttttctgctgcttcatcgctgtagccatgggaatccgtttcattattatggtaacaatatggagtgctgtattcctaaactcattattcaaccaagaagttcaaattcccttgaccgaaagttactgtggcccatgtcctaaaaactggatatgttacaaaaataactgctaccaattttttgatgagagtaaaaactggtatgagagccaggcttcttgtatgtctcaaaatgccagccttctgaaagtatacagcaaagaggaccaggatttacttaaactggtgaagtcatatcattggatgggactagtacacattccaacaaatggatcttggcagtgggaagatggctccattctctcacccaacctactaacaataattgaaatgcagaagggagactgtgcactctatgcctcgagctttaaaggctatatagaaaactgttcaactccaaatacgtacatctgcatgcaaaggactgtgtaaagatgatcaaccatctcaataaaagccaggaacagagaagagattacaccagcggtaacactgccaactgagactaaaggaaacaaacaaaaacaggacaaaatgaccaaagactgtcagatttcttagactccacaggaccaaaccatagaacaatttcactgcaaacatgcatgattctccaagacaaaagaagagagatcctaaaggcaattcagatatccccaaggctgcctctcccaccacaagcccagagtggatgggctgggggaggggtgctgttttaatttctaaaggtaggaccaacacccaggggatcagtgaaggaagagaaggccagcagatcactgagagtgcaaccccaccctccacaggaaattgcctcatgggcagggccacagcagagagacacagcatgggcagtgccttccctgcctgtgggggtcatgctgccacttttaatgggtcctccacccaacggggtcagggaggtggtgctgccccagtgggccatgattatcttaaaggcattattctccagccttaagtaagatcttaggacgtttcctttgctatgatttgtacttgcttgagtcccatgactgtttctcttcctctctttcttccttttggaatagtaatatccatcctatgtttgtcccactattgtattttggaagcacataacttgtttggtttcacaggttcacagttaagaaggaattttgcctctgaataaatagaatcttgagtctcatgcaaaaaaaaaaaaaaaaaa

SEQ ID NO: 17 - protein, 246 aa, Homo sapiens
MAAAAIPALLLCLPLLFLLFGWSRARRDDPHSLCYDITVIPKFRPGPRWCAVQGQVDEKTFLHYDCGNKTVTPVSPLGKKLNVTMAWKAQNPVLREVVDILTEQLLDIQLENYTPKEPLTLQARMSCEQKAEGHSSGSWQFSIDGQTFLLFDSEKRMWTTVHPGARKMKEKWENDKDVAMSFHYISMGDCIGWLEDFLMGMDSTLEPSAGAPLAMSSGTTQLRATATTLILCCLLIILPCFILPGI

SEQ ID NO: 18 - DNA, 802 bp, Homo sapiens
gatttcatcttccaggatccaccttgattaaatctcttgtccccagccctcctggtccccaatggcagcagccgccatcccagctttgcttctgtgcctcccgcttctgttcctgctgttcggctggtcccgggctaggcgagacgaccctcactctctttgctatgacatcaccgtcatccctaagttcagacctggaccacggtggtgtgcggttcaaggccaggtggatgaaaagacttttcttcactatgactgtggcaacaagacagtcacacccgtcagtcccctggggaagaaactaaatgtcacaatggcctggaaagcacagaacccagtactgagagaggtggtggacatacttacagagcaactgcttgacattcagctggagaattacacacccaaggaacccctcaccctgcaggcaaggatgtcttgtgagcagaaagctgaaggacacagcagtggatcttggcagttcagtatcgatggacagaccttcctactctttgactcagagaagagaatgtggacaacggttcatcctggagccagaaagatgaaagaaaagtgggagaatgacaaggatgtggccatgtccttccattacatctcaatgggagactgcataggatggcttgaggacttcttgatgggcatggacagcaccctggagccaagtgcaggagcaccactcgccatgtcctcaggcacaacccaactcagggccacagccaccaccctcatcctttgctgcctcctcatcatcctcccctgcttcatcctccctggcatctga

SEQ ID NO: 19 - protein, 244 aa, Homo sapiens
MAAAASPAILPRLAILPYLLFDWSGTGRADAHSLWYNFTIIHLPRHGQQWCEVQSQVDQKNFLSYDCGSDKVLSMGHLEEQLYATDAWGKQLEMLREVGQRLRLELADTELEDFTPSGPLTLQVRMSCECEADGYIRGSWQFSFDGRKFLLFDSNNRKWTVVHAGARRMKEKWEKDSGLTTFFKMVSMRDCKSWLRDFLMHRKKRLEPTAPPTMAPGLAQPKAIATTLSPWSFLIILCFILPGI

SEQ ID NO: 20 - DNA, 735 bp, Homo sapiens
atggcagcggccgccagccccgcgatccttccgcgcctcgcgattcttccgtacctgctattcgactggtccgggacggggcgggccgacgctcactctctctggtataacttcaccatcattcatttgcccagacatgggcaacagtggtgtgaggtccagagccaggtggatcagaagaattttctctcctatgactgtggcagtgacaaggtcttatctatgggtcacctagaagagcagctgtatgccacagatgcctggggaaaacaactggaaatgctgagagaggtggggcagaggctcagactggaactggctgacactgagctggaggatttcacacccagtggacccctcacgctgcaggtcaggatgtcttgtgagtgtgaagccgatggatacatccgtggatcttggcagttcagcttcgatggacggaagttcctcctctttgactcaaacaacagaaagtggacagtggttcacgctggagccaggcggatgaaagagaagtgggagaaggatagcggactgaccaccttcttcaagatggtctcaatgagagactgcaagagctggcttagggacttcctgatgcacaggaagaagaggctggaacccacagcaccacccaccatggccccaggcttagctcaacccaaagccatagccaccaccctcagtccctggagcttcctcatcatcctctgcttcatcctccctggcatctga

SEQ ID NO: 21 - protein, 162 aa, Homo sapiens
MRSSPGNMERIVICLMVIFLGTLVHKSSSQGQDRHMIRMRQLIDIVDQLKNYVNDLVPEFLPAPEDVETNCEWSAFSCFQKAQLKSANTGNNERIINVSIKKLKRKPPSTNAGRRQKHRLTCPSCDSYEKKPPKEFLERFKSLLQKMIHQHLSSRTHGSEDS

SEQ ID NO: 22 - DNA, 616 bp, Homo sapiens
ctgaagtgaaaacgagaccaaggtctagctctactgttggtacttatgagatccagtcctggcaacatggagaggattgtcatctgtctgatggtcatcttcttggggacactggtccacaaatcaagctcccaaggtcaagatcgccacatgattagaatgcgtcaacttatagatattgttgatcagctgaaaaattatgtgaatgacttggtccctgaatttctgccagctccagaagatgtagagacaaactgtgagtggtcagctttttcctgctttcagaaggcccaactaaagtcagcaaatacaggaaacaatgaaaggataatcaatgtatcaattaaaaagctgaagaggaaaccaccttccacaaatgcagggagaagacagaaacacagactaacatgcccttcatgtgattcttatgagaaaaaaccacccaaagaattcctagaaagattcaaatcacttctccaaaagatgattcatcagcatctgtcctctagaacacacggaagtgaagattcctgaggatctaacttgcagttggacactatgttacatactctaatatagtagtgaaagtcatttctttgtattccaagtggaggag

SEQ ID NO: 23 - protein, 255 aa, Homo sapiens
MILNKALLLGALALTAVMSPCGGEDIVADHVASYGVNFYQSHGPSGQYTHEFDGDEEFYVDLETKETVWQLPMFSKFISFDPQSALRNMAVGKHTLEFMMRQSNSTAATNEVPEVTVFSKFPVTLGQPNTLICLVDNIFPPVVNITWLSNGHSVTEGVSETSFLSKSDHSFFKISYLTFLPSADEIYDCKVEHWGLDEPLLKHWEPEIPAPMSELTETLVCALGLSVGLMGIVVGTVFIIQGLRSVGASRHQGLL

SEQ ID NO: 24 - DNA, 1709 bp, Homo sapiens
tcctcacaattgctctacagctcagagcagcaactgctgaggctgccttgggaagaagatgatcctaaacaaagctctgctgctgggggccctcgccctgactgccgtgatgagcccctgtggaggtgaagacattgtggctgaccatgttgcctcctatggtgtgaacttctaccagtctcacggtccctctggccagtacacccatgaatttgatggagacgaggagttctatgtggacctggagacgaaagagactgtctggcagttgcctatgtttagcaaatttataagttttgacccgcagagtgcactgagaaatatggctgtgggaaaacacaccttggaattcatgatgagacagtccaactctaccgctgccaccaatgaggttcctgaggtcacagtgttttccaagtttcctgtgacgctgggtcagcccaacaccctcatctgtcttgtggacaacatctttcctcctgtggtcaacatcacctggctgagcaatgggcactcagtcacagaaggtgtttctgagaccagcttcctctccaagagtgatcattccttcttcaagatcagttacctcaccttcctcccttctgctgatgagatttatgactgcaaggtggagcactggggcctggacgagcctcttctgaaacactgggagcctgagattccagcccctatgtcagagctcacagagactttggtctgcgccctggggttgtctgtgggcctcatgggcattgtggtgggcactgtcttcatcatccaaggcctgcgttcagttggtgcttccagacaccaagggctcttatgaatcccatcctgaaaaggaaggtgcatcaccatctacaggagaagaagaatggacttgctaaatgacctagcactattctctggcctgatttatcatatcccttttctcctccaaatgtttcttctctcacctcttctctgggacttaaggtgctatattccctcagagctcacaaatgcctttcaattctttccctgacctcctttcctgaatttttttattttctcaaatgttacctactaagggatgcctgggtaagccactcagctacctaattcctcaatgacctttatctaaaatctccatggaagcaataaattcccttttgatgcctctattgaatttttcccatctttcatctcagggctgactgagagcataacttagaatgggcgactcttatgttttaggccaatttcatatcattccccagatcatatttcaagtccagtaacacaggagcaaccaagtacagtgtatcctgataatttgttgatttcttaactggtgttaatatttctttcttccttttgttcctacccttggccactgccagccacccctcaattcaggtaccaacgaaccctctgcccttggctcagaatggttatagcagaaatacaaaaaaaaaaaaaaagtctgtactaatttcaatatggctcttaaaaggaatgacagagaaataggatacaagaattttgaatctcaaaagttatcaaaagtaaaaaattttgttaccaaaagtcaaactgcattctcaaaactttaaatttgtgaagaatgacaacagtagaagctttcctctccccttctcaccttgaggagataaaaattctctaggcaggaaaagaaatggaagccagttagaaaaacattgaaataa

SEQ ID NO: 25 - DNA, 20 bp, Artificial Sequence
  Description of Artificial Sequence: Synthetic primer
gatttcacacccagtggacc

SEQ ID NO: 26 - DNA, 22 bp, Artificial Sequence
  Description of Artificial Sequence: Synthetic primer
ctatggctttgggttgagctaa

SEQ ID NO: 27 - DNA, 21 bp, Artificial Sequence
  Description of Artificial Sequence: Synthetic primer
tccatgactgttggtggagca

SEQ ID NO: 28 - DNA, 22 bp, Artificial Sequence
  Description of Artificial Sequence: Synthetic primer
ctcctgctgagaattcactagg

SEQ ID NO: 29 - DNA, 20 bp, Artificial Sequence
  Description of Artificial Sequence: Synthetic primer
tcgctggtgtccatctttgg

SEQ ID NO: 30 - DNA, 21 bp, Artificial Sequence
  Description of Artificial Sequence: Synthetic primer
tggccaacattccaattgcag

SEQ ID NO: 31 - DNA, 23 bp, Artificial Sequence
  Description of Artificial Sequence: Synthetic primer
cgagatccagatggtcatcttac

SEQ ID NO: 32 - DNA, 20 bp, Artificial Sequence
  Description of Artificial Sequence: Synthetic primer
ggtctaggatggggttcaca

SEQ ID NO: 33 - DNA, 20 bp, Artificial Sequence
  Description of Artificial Sequence: Synthetic primer
ctcaccggcaagggaaggat

SEQ ID NO: 34 - DNA, 21 bp, Artificial Sequence
  Description of Artificial Sequence: Synthetic primer
gatgagtccccgctactttca

SEQ ID NO: 35 - DNA, 20 bp, Artificial Sequence
  Description of Artificial Sequence: Synthetic primer
tggcagcggagacagaggaa

SEQ ID NO: 36 - DNA, 20 bp, Artificial Sequence
  Description of Artificial Sequence: Synthetic primer
acgcaggcaagcacaacgga

SEQ ID NO: 37 - DNA, 20 bp, Artificial Sequence
  Description of Artificial Sequence: Synthetic primer
gggttttggtggtggctttg

SEQ ID NO: 38 - DNA, 23 bp, Artificial Sequence
  Description of Artificial Sequence: Synthetic primer
tcgtggttcttcttcaggtaggc

SEQ ID NO: 39 - DNA, 22 bp, Artificial Sequence
  Description of Artificial Sequence: Synthetic primer
tcaccagggctgcttttaactc

SEQ ID NO: 40 - DNA, 23 bp, Artificial Sequence
  Description of Artificial Sequence: Synthetic primer
gggtggaatcatattggaacatg

SEQ ID NO: 41 - DNA, 19 bp, Homo sapiens
actttcaattctagatcag

SEQ ID NO: 42 - DNA, 19 bp, Homo sapiens
ctgatctagaattgaaagt

SEQ ID NO: 43 - DNA, 19 bp, Homo sapiens
ctttcaattctagatcagg

SEQ ID NO: 44 - DNA, 19 bp, Homo sapiens
cctgatctagaattgaaag

SEQ ID NO: 45 - DNA, 19 bp, Homo sapiens
tttcaattctagatcagga

SEQ ID NO: 46 - DNA, 19 bp, Homo sapiens
tcctgatctagaattgaaa

SEQ ID NO: 47 - DNA, 19 bp, Homo sapiens
ttcaattctagatcaggaa

SEQ ID NO: 48 - DNA, 19 bp, Homo sapiens
ttcctgatctagaattgaa

SEQ ID NO: 49 - DNA, 19 bp, Homo sapiens
tcaattctagatcaggaac

SEQ ID NO: 50 - DNA, 19 bp, Homo sapiens
gttcctgatctagaattga

SEQ ID NO: 51 - DNA, 19 bp, Homo sapiens
caattctagatcaggaact

SEQ ID NO: 52 - DNA, 19 bp, Homo sapiens
agttcctgatctagaattg

SEQ ID NO: 53 - DNA, 19 bp, Homo sapiens
aattctagatcaggaactg

SEQ ID NO: 54 - DNA, 19 bp, Homo sapiens
cagttcctgatctagaatt

SEQ ID NO: 55 - DNA, 19 bp, Homo sapiens
attctagatcaggaactga

SEQ ID NO: 56 - DNA, 19 bp, Homo sapiens
tcagttcctgatctagaat

SEQ ID NO: 57 - DNA, 19 bp, Homo sapiens
ttctagatcaggaactgag

SEQ ID NO: 58 - DNA, 19 bp, Homo sapiens
ctcagttcctgatctagaa

SEQ ID NO: 59 - DNA, 19 bp, Homo sapiens
tctagatcaggaactgagg

SEQ ID NO: 60 - DNA, 19 bp, Homo sapiens
cctcagttcctgatctaga

SEQ ID NO: 61 - DNA, 19 bp, Homo sapiens
ctagatcaggaactgagga

SEQ ID NO: 62 - DNA, 19 bp, Homo sapiens
tcctcagttcctgatctag

SEQ ID NO: 63 - DNA, 19 bp, Homo sapiens
tagatcaggaactgaggac

SEQ ID NO: 64 - DNA, 19 bp, Homo sapiens
gtcctcagttcctgatcta

SEQ ID NO: 65 - DNA, 19 bp, Homo sapiens
agatcaggaactgaggaca

SEQ ID NO: 66 - DNA, 19 bp, Homo sapiens
tgtcctcagttcctgatct

SEQ ID NO: 67 - DNA, 19 bp, Homo sapiens
gatcaggaactgaggacat

SEQ ID NO: 68 - DNA, 19 bp, Homo sapiens
atgtcctcagttcctgatc

SEQ ID NO: 69 - DNA, 19 bp, Homo sapiens
atcaggaactgaggacata

SEQ ID NO: 70 - DNA, 19 bp, Homo sapiens
tatgtcctcagttcctgat

SEQ ID NO: 71 - DNA, 19 bp, Homo sapiens
tcaggaactgaggacatat

SEQ ID NO: 72 - DNA, 19 bp, Homo sapiens
atatgtcctcagttcctga

SEQ ID NO: 73 - DNA, 19 bp, Homo sapiens
caggaactgaggacatatc

SEQ ID NO: 74 - DNA, 19 bp, Homo sapiens
gatatgtcctcagttcctg

SEQ ID NO: 75 - DNA, 19 bp, Homo sapiens
aggaactgaggacatatct

SEQ ID NO: 76 - DNA, 19 bp, Homo sapiens
agatatgtcctcagttcct

SEQ ID NO: 77 - DNA, 19 bp, Homo sapiens
ggaactgaggacatatcta

SEQ ID NO: 78 - DNA, 19 bp, Homo sapiens
tagatatgtcctcagttcc

SEQ ID NO: 79 - DNA, 19 bp, Homo sapiens
gaactgaggacatatctaa

SEQ ID NO: 80 - DNA, 19 bp, Homo sapiens
ttagatatgtcctcagttc

SEQ ID NO: 81 - DNA, 19 bp, Homo sapiens
aactgaggacatatctaaa

SEQ ID NO: 82 - DNA, 19 bp, Homo sapiens
tttagatatgtcctcagtt

SEQ ID NO: 83 - DNA, 19 bp, Homo sapiens
actgaggacatatctaaat

SEQ ID NO: 84 - DNA, 19 bp, Homo sapiens
atttagatatgtcctcagt

SEQ ID NO: 85 - DNA, 19 bp, Homo sapiens
ctgaggacatatctaaatt

SEQ ID NO: 86 - DNA, 19 bp, Homo sapiens
aatttagatatgtcctcag

SEQ ID NO: 87 - DNA, 19 bp, Homo sapiens
tgaggacatatctaaattt

SEQ ID NO: 88 - DNA, 19 bp, Homo sapiens
aaatttagatatgtcctca

SEQ ID NO: 89 - DNA, 19 bp, Homo sapiens
gaggacatatctaaatttt

SEQ ID NO: 90 - DNA, 19 bp, Homo sapiens
aaaatttagatatgtcctc

SEQ ID NO: 91 - DNA, 19 bp, Homo sapiens
aggacatatctaaattttc

SEQ ID NO: 92 - DNA, 19 bp, Homo sapiens
gaaaatttagatatgtcct

SEQ ID NO: 93 - DNA, 19 bp, Homo sapiens
ggacatatctaaattttct

SEQ ID NO: 94 - DNA, 19 bp, Homo sapiens
agaaaatttagatatgtcc

SEQ ID NO: 95 - DNA, 19 bp, Homo sapiens
gacatatctaaattttcta

SEQ ID NO: 96 - DNA, 19 bp, Homo sapiens
tagaaaatttagatatgtc

SEQ ID NO: 97 - DNA, 19 bp, Homo sapiens
acatatctaaattttctag

SEQ ID NO: 98 - DNA, 19 bp, Homo sapiens
ctagaaaatttagatatgt

SEQ ID NO: 99 - DNA, 19 bp, Homo sapiens
catatctaaattttctagt

SEQ ID NO: 100 - DNA, 19 bp, Homo sapiens
actagaaaatttagatatg

SEQ ID NO: 101 - DNA, 19 bp, Homo sapiens
atatctaaattttctagtt

SEQ ID NO: 102 - DNA, 19 bp, Homo sapiens
aactagaaaatttagatat

SEQ ID NO: 103 - DNA, 19 bp, Homo sapiens
tatctaaattttctagttt

SEQ ID NO: 104 - DNA, 19 bp, Homo sapiens
aaactagaaaatttagata

SEQ ID NO: 105 - DNA, 19 bp, Homo sapiens
atctaaattttctagtttt

SEQ ID NO: 106 - DNA, 19 bp, Homo sapiens
aaaactagaaaatttagat

SEQ ID NO: 107 - DNA, 19 bp, Homo sapiens
tctaaattttctagtttta

SEQ ID NO: 108 - DNA, 19 bp, Homo sapiens
taaaactagaaaatttaga

SEQ ID NO: 109 - DNA, 19 bp, Homo sapiens
ctaaattttctagttttat

SEQ ID NO: 110 - DNA, 19 bp, Homo sapiens
ataaaactagaaaatttag

SEQ ID NO: 111 - DNA, 19 bp, Homo sapiens
taaattttctagttttata

SEQ ID NO: 112 - DNA, 19 bp, Homo sapiens
tataaaactagaaaattta

SEQ ID NO: 113 - DNA, 19 bp, Homo sapiens
aaattttctagttttatag

SEQ ID NO: 114 - DNA, 19 bp, Homo sapiens
ctataaaactagaaaattt

SEQ ID NO: 115 - DNA, 19 bp, Homo sapiens
aattttctagttttataga

SEQ ID NO: 116 - DNA, 19 bp, Homo sapiens
tctataaaactagaaaatt

SEQ ID NO: 117 - DNA, 19 bp, Homo sapiens
attttctagttttatagaa

SEQ ID NO: 118 - DNA, 19 bp, Homo sapiens
ttctataaaactagaaaat

SEQ ID NO: 119 - DNA, 19 bp, Homo sapiens
ttttctagttttatagaag

SEQ ID NO: 120 - DNA, 19 bp, Homo sapiens
cttctataaaactagaaaa

SEQ ID NO: 121 - DNA, 19 bp, Homo sapiens
tttctagttttatagaagg

SEQ ID NO: 122 - DNA, 19 bp, Homo sapiens
ccttctataaaactagaaa

SEQ ID NO: 123 - DNA, 19 bp, Homo sapiens
ttctagttttatagaaggc

SEQ ID NO: 124 - DNA, 19 bp, Homo sapiens
gccttctataaaactagaa

SEQ ID NO: 125 - DNA, 19 bp, Homo sapiens
tctagttttatagaaggct

SEQ ID NO: 126 - DNA, 19 bp, Homo sapiens
agccttctataaaactaga

SEQ ID NO: 127 - DNA, 19 bp, Homo sapiens
ctagttttatagaaggctt

SEQ ID NO: 128 - DNA, 19 bp, Homo sapiens
aagccttctataaaactag

SEQ ID NO: 129 - DNA, 19 bp, Homo sapiens
tagttttatagaaggcttt

SEQ ID NO: 130 - DNA, 19 bp, Homo sapiens
aaagccttctataaaacta

SEQ ID NO: 131 - DNA, 19 bp, Homo sapiens
agttttatagaaggctttt

SEQ ID NO: 132 - DNA, 19 bp, Homo sapiens
aaaagccttctataaaact

SEQ ID NO: 133 - DNA, 19 bp, Homo sapiens
gttttatagaaggctttta

SEQ ID NO: 134 - DNA, 19 bp, Homo sapiens
taaaagccttctataaaac

SEQ ID NO: 135 - DNA, 19 bp, Homo sapiens
ttttatagaaggcttttat

SEQ ID NO: 136 - DNA, 19 bp, Homo sapiens
ataaaagccttctataaaa

SEQ ID NO: 137 - DNA, 19 bp, Homo sapiens
tttatagaaggcttttatc

SEQ ID NO: 138 - DNA, 19 bp, Homo sapiens
gataaaagccttctataaa

SEQ ID NO: 139 - DNA, 19 bp, Homo sapiens
ttatagaaggcttttatcc

SEQ ID NO: 140 - DNA, 19 bp, Homo sapiens
ggataaaagccttctataa

SEQ ID NO: 141 - DNA, 19 bp, Homo sapiens
tatagaaggcttttatcca

SEQ ID NO: 142 - DNA, 19 bp, Homo sapiens
tggataaaagccttctata

SEQ ID NO: 143 - DNA, 19 bp, Homo sapiens
atagaaggcttttatccac

SEQ ID NO: 144 - DNA, 19 bp, Homo sapiens
gtggataaaagccttctat

SEQ ID NO: 145 - DNA, 19 bp, Homo sapiens
tagaaggcttttatccaca

SEQ ID NO: 146 - DNA, 19 bp, Homo sapiens
tgtggataaaagccttcta

SEQ ID NO: 147 - DNA, 19 bp, Homo sapiens
agaaggcttttatccacaa

SEQ ID NO: 148 - DNA, 19 bp, Homo sapiens
ttgtggataaaagccttct

SEQ ID NO: 149 - DNA, 19 bp, Homo sapiens
gaaggcttttatccacaag

SEQ ID NO: 150 - DNA, 19 bp, Homo sapiens
cttgtggataaaagccttc

SEQ ID NO: 151 - DNA, 19 bp, Homo sapiens
aaggcttttatccacaaga

SEQ ID NO: 152 - DNA, 19 bp, Homo sapiens
tcttgtggataaaagcctt

SEQ ID NO: 153 - DNA, 19 bp, Homo sapiens
aggcttttatccacaagaa

SEQ ID NO: 154 - DNA, 19 bp, Homo sapiens
ttcttgtggataaaagcct

SEQ ID NO: 155 - DNA, 19 bp, Homo sapiens
ggcttttatccacaagaat

SEQ ID NO: 156 - DNA, 19 bp, Homo sapiens
attcttgtggataaaagcc

SEQ ID NO: 157 - DNA, 19 bp, Homo sapiens
gcttttatccacaagaatc

SEQ ID NO: 158 - DNA, 19 bp, Homo sapiens
gattcttgtggataaaagc

SEQ ID NO: 159 - DNA, 19 bp, Homo sapiens
cttttatccacaagaatca

SEQ ID NO: 160 - DNA, 19 bp, Homo sapiens
tgattcttgtggataaaag

SEQ ID NO: 161 - DNA, 19 bp, Homo sapiens
ttttatccacaagaatcaa

SEQ ID NO: 162 - DNA, 19 bp, Homo sapiens
ttgattcttgtggataaaa

SEQ ID NO: 163 - DNA, 19 bp, Homo sapiens
tttatccacaagaatcaag

SEQ ID NO: 164 - DNA, 19 bp, Homo sapiens
cttgattcttgtggataaa

SEQ ID NO: 165 - DNA, 19 bp, Homo sapiens
ttatccacaagaatcaaga

SEQ ID NO: 166 - DNA, 19 bp, Homo sapiens
tcttgattcttgtggataa

SEQ ID NO: 167 - DNA, 19 bp, Homo sapiens
tatccacaagaatcaagat

SEQ ID NO: 168 - DNA, 19 bp, Homo sapiens
atcttgattcttgtggata

SEQ ID NO: 169 - DNA, 19 bp, Homo sapiens
atccacaagaatcaagatc

SEQ ID NO: 170 - DNA, 19 bp, Homo sapiens
gatcttgattcttgtggat

SEQ ID NO: 171 - DNA, 19 bp, Homo sapiens
tccacaagaatcaagatct

SEQ ID NO: 172 - DNA, 19 bp, Homo sapiens
agatcttgattcttgtgga

SEQ ID NO: 173 - DNA, 19 bp, Homo sapiens
ccacaagaatcaagatctt

SEQ ID NO: 174 - DNA, 19 bp, Homo sapiens
aagatcttgattcttgtgg

SEQ ID NO: 175 - DNA, 19 bp, Homo sapiens
cacaagaatcaagatcttc

SEQ ID NO: 176 - DNA, 19 bp, Homo sapiens
gaagatcttgattcttgtg

SEQ ID NO: 177 - DNA, 19 bp, Homo sapiens
acaagaatcaagatcttcc

SEQ ID NO: 178 - DNA, 19 bp, Homo sapiens
ggaagatcttgattcttgt

SEQ ID NO: 179 - DNA, 19 bp, Homo sapiens
caagaatcaagatcttccc

SEQ ID NO: 180 - DNA, 19 bp, Homo sapiens
gggaagatcttgattcttg

SEQ ID NO: 181 - DNA, 19 bp, Homo sapiens
aagaatcaagatcttccct

SEQ ID NO: 182 - DNA, 19 bp, Homo sapiens
agggaagatcttgattctt

SEQ ID NO: 183 - DNA, 19 bp, Homo sapiens
agaatcaagatcttccctc

SEQ ID NO: 184 - DNA, 19 bp, Homo sapiens
gagggaagatcttgattct

SEQ ID NO: 185 - DNA, 19 bp, Homo sapiens
gaatcaagatcttccctct

SEQ ID NO: 186 - DNA, 19 bp, Homo sapiens
agagggaagatcttgattc

SEQ ID NO: 187 - DNA, 19 bp, Homo sapiens
aatcaagatcttccctctc

SEQ ID NO: 188 - DNA, 19 bp, Homo sapiens
gagagggaagatcttgatt

SEQ ID NO: 189 - DNA, 19 bp, Homo sapiens
atcaagatcttccctctct

SEQ ID NO: 190 - DNA, 19 bp, Homo sapiens
agagagggaagatcttgat

SEQ ID NO: 191 - DNA, 19 bp, Homo sapiens
tcaagatcttccctctctg

SEQ ID NO: 192 - DNA, 19 bp, Homo sapiens
cagagagggaagatcttga

SEQ ID NO: 193 - DNA, 19 bp, Homo sapiens
caagatcttccctctctga

SEQ ID NO: 194 - DNA, 19 bp, Homo sapiens
tcagagagggaagatcttg

SEQ ID NO: 195 - DNA, 19 bp, Homo sapiens
aagatcttccctctctgag

SEQ ID NO: 196 - DNA, 19 bp, Homo sapiens
ctcagagagggaagatctt

SEQ ID NO: 197 - DNA, 19 bp, Homo sapiens
agatcttccctctctgagc

SEQ ID NO: 198 - DNA, 19 bp, Homo sapiens
gctcagagagggaagatct

SEQ ID NO: 199 - DNA, 19 bp, Homo sapiens
gatcttccctctctgagca

SEQ ID NO: 200 - DNA, 19 bp, Homo sapiens
tgctcagagagggaagatc

SEQ ID NO: 201 - DNA, 19 bp, Homo sapiens
atcttccctctctgagcag

SEQ ID NO: 202 - DNA, 19 bp, Homo sapiens
ctgctcagagagggaagat

SEQ ID NO: 203 - DNA, 19 bp, Homo sapiens
tcttccctctctgagcagg

SEQ ID NO: 204 - DNA, 19 bp, Homo sapiens
cctgctcagagagggaaga

SEQ ID NO: 205 - DNA, 19 bp, Homo sapiens
cttccctctctgagcagga

SEQ ID NO: 206 - DNA, 19 bp, Homo sapiens
tcctgctcagagagggaag

SEQ ID NO: 207 - DNA, 19 bp, Homo sapiens
ttccctctctgagcaggaa

SEQ ID NO: 208 - DNA, 19 bp, Homo sapiens
ttcctgctcagagagggaa

SEQ ID NO: 209 - DNA, 19 bp, Homo sapiens
tccctctctgagcaggaat

SEQ ID NO: 210 - DNA, 19 bp, Homo sapiens
attcctgctcagagaggga

SEQ ID NO: 211 - DNA, 19 bp, Homo sapiens
ccctctctgagcaggaatc

SEQ ID NO: 212 - DNA, 19 bp, Homo sapiens
gattcctgctcagagaggg

SEQ ID NO: 213 - DNA, 19 bp, Homo sapiens
cctctctgagcaggaatcc

SEQ ID NO: 214 - DNA, 19 bp, Homo sapiens
ggattcctgctcagagagg

SEQ ID NO: 215 - DNA, 19 bp, Homo sapiens
ctctctgagcaggaatcct

SEQ ID NO: 216 - DNA, 19 bp, Homo sapiens
aggattcctgctcagagag

SEQ ID NO: 217 - DNA, 19 bp, Homo sapiens
tctctgagcaggaatcctt

SEQ ID NO: 218 - DNA, 19 bp, Homo sapiens
aaggattcctgctcagaga

SEQ ID NO: 219 - DNA, 19 bp, Homo sapiens
ctctgagcaggaatccttt

SEQ ID NO: 220 - DNA, 19 bp, Homo sapiens
aaaggattcctgctcagag

SEQ ID NO: 221 - DNA, 19 bp, Homo sapiens
tctgagcaggaatcctttg

SEQ ID NO: 222 - DNA, 19 bp, Homo sapiens
caaaggattcctgctcaga

SEQ ID NO: 223 - DNA, 19 bp, Homo sapiens
ctgagcaggaatcctttgt

SEQ ID NO: 224 - DNA, 19 bp, Homo sapiens
acaaaggattcctgctcag

SEQ ID NO: 225 - DNA, 19 bp, Homo sapiens
tgagcaggaatcctttgtg

SEQ ID NO: 226 - DNA, 19 bp, Homo sapiens
cacaaaggattcctgctca

SEQ ID NO: 227 - DNA, 19 bp, Homo sapiens
gagcaggaatcctttgtgc

SEQ ID NO: 228 - DNA, 19 bp, Homo sapiens
gcacaaaggattcctgctc

SEQ ID NO: 229 - DNA, 19 bp, Homo sapiens
agcaggaatcctttgtgca

SEQ ID NO: 230 - DNA, 19 bp, Homo sapiens
tgcacaaaggattcctgct

SEQ ID NO: 231 - DNA, 19 bp, Homo sapiens
gcaggaatcctttgtgcat

SEQ ID NO: 232 - DNA, 19 bp, Homo sapiens
atgcacaaaggattcctgc

SEQ ID NO: 233 - DNA, 19 bp, Homo sapiens
caggaatcctttgtgcatt

SEQ ID NO: 234 - DNA, 19 bp, Homo sapiens
aatgcacaaaggattcctg

SEQ ID NO: 235 - DNA, 19 bp, Homo sapiens
aggaatcctttgtgcattg

SEQ ID NO: 236 - DNA, 19 bp, Homo sapiens
caatgcacaaaggattcct

SEQ ID NO: 237 - DNA, 19 bp, Homo sapiens
ggaatcctttgtgcattga

SEQ ID NO: 238 - DNA, 19 bp, Homo sapiens
tcaatgcacaaaggattcc

SEQ ID NO: 239 - DNA, 19 bp, Homo sapiens
gaatcctttgtgcattgaa

SEQ ID NO: 240 - DNA, 19 bp, Homo sapiens
ttcaatgcacaaaggattc

SEQ ID NO: 241 - DNA, 19 bp, Homo sapiens
aatcctttgtgcattgaag

SEQ ID NO: 242 - DNA, 19 bp, Homo sapiens
cttcaatgcacaaaggatt

SEQ ID NO: 243 - DNA, 19 bp, Homo sapiens
atcctttgtgcattgaaga

SEQ ID NO: 244 - DNA, 19 bp, Homo sapiens
tcttcaatgcacaaaggat

SEQ ID NO: 245 - DNA, 19 bp, Homo sapiens
tcctttgtgcattgaagac

SEQ ID NO: 246 - DNA, 19 bp, Homo sapiens
gtcttcaatgcacaaagga

SEQ ID NO: 247 - DNA, 19 bp, Homo sapiens
cctttgtgcattgaagact

SEQ ID NO: 248 - DNA, 19 bp, Homo sapiens
agtcttcaatgcacaaagg

SEQ ID NO: 249 - DNA, 19 bp, Homo sapiens
ctttgtgcattgaagactt

SEQ ID NO: 250 - DNA, 19 bp, Homo sapiens
aagtcttcaatgcacaaag

SEQ ID NO: 251 - DNA, 19 bp, Homo sapiens
tttgtgcattgaagacttt

SEQ ID NO: 252 - DNA, 19 bp, Homo sapiens
aaagtcttcaatgcacaaa

SEQ ID NO: 253 - DNA, 19 bp, Homo sapiens
ttgtgcattgaagacttta

SEQ ID NO: 254 - DNA, 19 bp, Homo sapiens
taaagtcttcaatgcacaa

SEQ ID NO: 255 - DNA, 19 bp, Homo sapiens
tgtgcattgaagactttag

SEQ ID NO: 256 - DNA, 19 bp, Homo sapiens
ctaaagtcttcaatgcaca

SEQ ID NO: 257 - DNA, 19 bp, Homo sapiens
gtgcattgaagactttaga

SEQ ID NO: 258 - DNA, 19 bp, Homo sapiens
tctaaagtcttcaatgcac

SEQ ID NO: 259 - DNA, 19 bp, Homo sapiens
tgcattgaagactttagat

SEQ ID NO: 260 - DNA, 19 bp, Homo sapiens
atctaaagtcttcaatgca

SEQ ID NO: 261 - DNA, 19 bp, Homo sapiens
gcattgaagactttagatt

SEQ ID NO: 262 - DNA, 19 bp, Homo sapiens
aatctaaagtcttcaatgc

SEQ ID NO: 263 - DNA, 19 bp, Homo sapiens
cattgaagactttagattc

SEQ ID NO: 264 - DNA, 19 bp, Homo sapiens
gaatctaaagtcttcaatg

SEQ ID NO: 265 - DNA, 19 bp, Homo sapiens
attgaagactttagattcc

SEQ ID NO: 266 - DNA, 19 bp, Homo sapiens
ggaatctaaagtcttcaat

SEQ ID NO: 267 - DNA, 19 bp, Homo sapiens
ttgaagactttagattcct

SEQ ID NO: 268 - DNA, 19 bp, Homo sapiens
aggaatctaaagtcttcaa

SEQ ID NO: 269 - DNA, 19 bp, Homo sapiens
tgaagactttagattcctc

SEQ ID NO: 270 - DNA, 19 bp, Homo sapiens
gaggaatctaaagtcttca

SEQ ID NO: 271 - DNA, 19 bp, Homo sapiens
gaagactttagattcctct

SEQ ID NO: 272 - DNA, 19 bp, Homo sapiens
agaggaatctaaagtcttc

SEQ ID NO: 273 - DNA, 19 bp, Homo sapiens
aagactttagattcctctc

SEQ ID NO: 274 - DNA, 19 bp, Homo sapiens
gagaggaatctaaagtctt

SEQ ID NO: 275 - DNA, 19 bp, Homo sapiens
agactttagattcctctct

SEQ ID NO: 276 - DNA, 19 bp, Homo sapiens
agagaggaatctaaagtct

SEQ ID NO: 277 - DNA, 19 bp, Homo sapiens
gactttagattcctctctg

SEQ ID NO: 278 - DNA, 19 bp, Homo sapiens
cagagaggaatctaaagtc

SEQ ID NO: 279 - DNA, 19 bp, Homo sapiens
actttagattcctctctgc

SEQ ID NO: 280 - DNA, 19 bp, Homo sapiens
gcagagaggaatctaaagt

SEQ ID NO: 281 - DNA, 19 bp, Homo sapiens
ctttagattcctctctgcg

SEQ ID NO: 282 - DNA, 19 bp, Homo sapiens
cgcagagaggaatctaaag

SEQ ID NO: 283 - DNA, 19 bp, Homo sapiens
tttagattcctctctgcgg

SEQ ID NO: 284 - DNA, 19 bp, Homo sapiens
ccgcagagaggaatctaaa

SEQ ID NO: 285 - DNA, 19 bp, Homo sapiens
ttagattcctctctgcggt

SEQ ID NO: 286 - DNA, 19 bp, Homo sapiens
accgcagagaggaatctaa

SEQ ID NO: 287 - DNA, 19 bp, Homo sapiens
tagattcctctctgcggta

SEQ ID NO: 288 - DNA, 19 bp, Homo sapiens
taccgcagagaggaatcta

SEQ ID NO: 289 - DNA, 19 bp, Homo sapiens
agattcctctctgcggtag

SEQ ID NO: 290 - DNA, 19 bp, Homo sapiens
ctaccgcagagaggaatct

SEQ ID NO: 291 - DNA, 19 bp, Homo sapiens
gattcctctctgcggtaga

SEQ ID NO: 292 - DNA, 19 bp, Homo sapiens
tctaccgcagagaggaatc

SEQ ID NO: 293 - DNA, 19 bp, Homo sapiens
attcctctctgcggtagac

SEQ ID NO: 294 - DNA, 19 bp, Homo sapiens
gtctaccgcagagaggaat

SEQ ID NO: 295 - DNA, 19 bp, Homo sapiens
ttcctctctgcggtagacg

SEQ ID NO: 296 - DNA, 19 bp, Homo sapiens
cgtctaccgcagagaggaa

SEQ ID NO: 297 - DNA, 19 bp, Homo sapiens
tcctctctgcggtagacgt

SEQ ID NO: 298 - DNA, 19 bp, Homo sapiens
acgtctaccgcagagagga

SEQ ID NO: 299 - DNA, 19 bp, Homo sapiens
cctctctgcggtagacgtg

SEQ ID NO: 300 - DNA, 19 bp, Homo sapiens
cacgtctaccgcagagagg

SEQ ID NO: 301 - DNA, 19 bp, Homo sapiens
ctctctgcggtagacgtgc

SEQ ID NO: 302 - DNA, 19 bp, Homo sapiens
gcacgtctaccgcagagag

SEQ ID NO: 303 - DNA, 19 bp, Homo sapiens
tctctgcggtagacgtgca

SEQ ID NO: 304 - DNA, 19 bp, Homo sapiens
tgcacgtctaccgcagaga

SEQ ID NO: 305 - DNA, 19 bp, Homo sapiens
ctctgcggtagacgtgcac

SEQ ID NO: 306 - DNA, 19 bp, Homo sapiens
gtgcacgtctaccgcagag

SEQ ID NO: 307 - DNA, 19 bp, Homo sapiens
tctgcggtagacgtgcact

SEQ ID NO: 308 - DNA, 19 bp, Homo sapiens
agtgcacgtctaccgcaga

SEQ ID NO: 309 - DNA, 19 bp, Homo sapiens
ctgcggtagacgtgcactt

SEQ ID NO: 310 - DNA, 19 bp, Homo sapiens
aagtgcacgtctaccgcag

SEQ ID NO: 311 - DNA, 19 bp, Homo sapiens
tgcggtagacgtgcactta

SEQ ID NO: 312 - DNA, 19 bp, Homo sapiens
taagtgcacgtctaccgca

SEQ ID NO: 313 - DNA, 19 bp, Homo sapiens
gcggtagacgtgcacttat

SEQ ID NO: 314 - DNA, 19 bp, Homo sapiens
ataagtgcacgtctaccgc

SEQ ID NO: 315 - DNA, 19 bp, Homo sapiens
cggtagacgtgcacttata

SEQ ID NO: 316 - DNA, 19 bp, Homo sapiens
tataagtgcacgtctaccg

SEQ ID NO: 317 - DNA, 19 bp, Homo sapiens
ggtagacgtgcacttataa

SEQ ID NO: 318 - DNA, 19 bp, Homo sapiens
ttataagtgcacgtctacc

SEQ ID NO: 319 - DNA, 19 bp, Homo sapiens
gtagacgtgcacttataag

SEQ ID NO: 320 - DNA, 19 bp, Homo sapiens
cttataagtgcacgtctac

SEQ ID NO: 321 - DNA, 19 bp, Homo sapiens
tagacgtgcacttataagt

SEQ ID NO: 322 - DNA, 19 bp, Homo sapiens
acttataagtgcacgtcta

SEQ ID NO: 323 - DNA, 19 bp, Homo sapiens
agacgtgcacttataagta

SEQ ID NO: 324 - DNA, 19 bp, Homo sapiens
tacttataagtgcacgtct

SEQ ID NO: 325 - DNA, 19 bp, Homo sapiens
gacgtgcacttataagtat

SEQ ID NO: 326 - DNA, 19 bp, Homo sapiens
atacttataagtgcacgtc

SEQ ID NO: 327 - DNA, 19 bp, Homo sapiens
acgtgcacttataagtatt

SEQ ID NO: 328 - DNA, 19 bp, Homo sapiens
aatacttataagtgcacgt

SEQ ID NO: 329 - DNA, 19 bp, Homo sapiens
cgtgcacttataagtattt

SEQ ID NO: 330 - DNA, 19 bp, Homo sapiens
aaatacttataagtgcacg

SEQ ID NO: 331 - DNA, 19 bp, Homo sapiens
gtgcacttataagtatttg

SEQ ID NO: 332 - DNA, 19 bp, Homo sapiens
caaatacttataagtgcac

SEQ ID NO: 333 - DNA, 19 bp, Homo sapiens
tgcacttataagtatttga

SEQ ID NO: 334 - DNA, 19 bp, Homo sapiens
tcaaatacttataagtgca

SEQ ID NO: 335 - DNA, 19 bp, Homo sapiens
gcacttataagtatttgat

SEQ ID NO: 336 - DNA, 19 bp, Homo sapiens
atcaaatacttataagtgc

SEQ ID NO: 337 - DNA, 19 bp, Homo sapiens
cacttataagtatttgatg

SEQ ID NO: 338 - DNA, 19 bp, Homo sapiens
catcaaatacttataagtg

SEQ ID NO: 339 - DNA, 19 bp, Homo sapiens
acttataagtatttgatgg

SEQ ID NO: 340 - DNA, 19 bp, Homo sapiens
ccatcaaatacttataagt

SEQ ID NO: 341 - DNA, 19 bp, Homo sapiens
cttataagtatttgatggg

SEQ ID NO: 342 - DNA, 19 bp, Homo sapiens
cccatcaaatacttataag

SEQ ID NO: 343 - DNA, 19 bp, Homo sapiens
ttataagtatttgatgggg

SEQ ID NO: 344 - DNA, 19 bp, Homo sapiens
ccccatcaaatacttataa

SEQ ID NO: 345 - DNA, 19 bp, Homo sapiens
tataagtatttgatggggt

SEQ ID NO: 346 - DNA, 19 bp, Homo sapiens
accccatcaaatacttata

SEQ ID NO: 347 - DNA, 19 bp, Homo sapiens
ataagtatttgatggggtg

SEQ ID NO: 348 - DNA, 19 bp, Homo sapiens
caccccatcaaatacttat

SEQ ID NO: 349 - DNA, 19 bp, Homo sapiens
taagtatttgatggggtgg

SEQ ID NO: 350 - DNA, 19 bp, Homo sapiens
ccaccccatcaaatactta

SEQ ID NO: 351 - DNA, 19 bp, Homo sapiens
aagtatttgatggggtgga

SEQ ID NO: 352 - DNA, 19 bp, Homo sapiens
tccaccccatcaaatactt

SEQ ID NO: 353 - DNA, 19 bp, Homo sapiens
agtatttgatggggtggat

SEQ ID NO: 354 - DNA, 19 bp, Homo sapiens
atccaccccatcaaatact

SEQ ID NO: 355 - DNA, 19 bp, Homo sapiens
gtatttgatggggtggatt

SEQ ID NO: 356 - DNA, 19 bp, Homo sapiens
aatccaccccatcaaatac

SEQ ID NO: 357 - DNA, 19 bp, Homo sapiens
tatttgatggggtggattc

SEQ ID NO: 358 - DNA, 19 bp, Homo sapiens
gaatccaccccatcaaata

SEQ ID NO: 359 - DNA, 19 bp, Homo sapiens
atttgatggggtggattcg

SEQ ID NO: 360 - DNA, 19 bp, Homo sapiens
cgaatccaccccatcaaat

SEQ ID NO: 361 - DNA, 19 bp, Homo sapiens
tttgatggggtggattcgt

SEQ ID NO: 362 - DNA, 19 bp, Homo sapiens
acgaatccaccccatcaaa

SEQ ID NO: 363 - DNA, 19 bp, Homo sapiens
ttgatggggtggattcgtg

SEQ ID NO: 364 - DNA, 19 bp, Homo sapiens
cacgaatccaccccatcaa

SEQ ID NO: 365 - DNA, 19 bp, Homo sapiens
tgatggggtggattcgtgg

SEQ ID NO: 366 - DNA, 19 bp, Homo sapiens
ccacgaatccaccccatca

SEQ ID NO: 367 - DNA, 19 bp, Homo sapiens
gatggggtggattcgtggt

SEQ ID NO: 368 - DNA, 19 bp, Homo sapiens
accacgaatccaccccatc

SEQ ID NO: 369 - DNA, 19 bp, Homo sapiens
atggggtggattcgtggtc

SEQ ID NO: 370 - DNA, 19 bp, Homo sapiens
gaccacgaatccaccccat

SEQ ID NO: 371 - DNA, 19 bp, Homo sapiens
tggggtggattcgtggtcg

SEQ ID NO: 372 - DNA, 19 bp, Homo sapiens
cgaccacgaatccacccca

SEQ ID NO: 373 - DNA, 19 bp, Homo sapiens
ggggtggattcgtggtcgg

SEQ ID NO: 374 - DNA, 19 bp, Homo sapiens
ccgaccacgaatccacccc

SEQ ID NO: 375 - DNA, 19 bp, Homo sapiens
gggtggattcgtggtcgga

SEQ ID NO: 376 - DNA, 19 bp, Homo sapiens
tccgaccacgaatccaccc

SEQ ID NO: 377 - DNA, 19 bp, Homo sapiens
ggtggattcgtggtcggag

SEQ ID NO: 378 - DNA, 19 bp, Homo sapiens
ctccgaccacgaatccacc

SEQ ID NO: 379 - DNA, 19 bp, Homo sapiens
gtggattcgtggtcggagg

SEQ ID NO: 380 - DNA, 19 bp, Homo sapiens
cctccgaccacgaatccac

SEQ ID NO: 381 - DNA, 19 bp, Homo sapiens
tggattcgtggtcggaggt

SEQ ID NO: 382 - DNA, 19 bp, Homo sapiens
acctccgaccacgaatcca

SEQ ID NO: 383 - DNA, 19 bp, Homo sapiens
ggattcgtggtcggaggtc

SEQ ID NO: 384 - DNA, 19 bp, Homo sapiens
gacctccgaccacgaatcc

SEQ ID NO: 385 - DNA, 19 bp, Homo sapiens
gattcgtggtcggaggtct

SEQ ID NO: 386 - DNA, 19 bp, Homo sapiens
agacctccgaccacgaatc

SEQ ID NO: 387 - DNA, 19 bp, Homo sapiens
attcgtggtcggaggtctc

SEQ ID NO: 388 - DNA, 19 bp, Homo sapiens
gagacctccgaccacgaat

SEQ ID NO: 389 - DNA, 19 bp, Homo sapiens
ttcgtggtcggaggtctcg

SEQ ID NO: 390 - DNA, 19 bp, Homo sapiens
cgagacctccgaccacgaa

SEQ ID NO: 391 - DNA, 19 bp, Homo sapiens
tcgtggtcggaggtctcga

SEQ ID NO: 392 - DNA, 19 bp, Homo sapiens
tcgagacctccgaccacga

SEQ ID NO: 393 - DNA, 19 bp, Homo sapiens
cgtggtcggaggtctcgac

SEQ ID NO: 394 - DNA, 19 bp, Homo sapiens
gtcgagacctccgaccacg

SEQ ID NO: 395 - DNA, 19 bp, Homo sapiens
gtggtcggaggtctcgaca

SEQ ID NO: 396 - DNA, 19 bp, Homo sapiens
tgtcgagacctccgaccac

SEQ ID NO: 397 - DNA, 19 bp, Homo sapiens
tggtcggaggtctcgacac

SEQ ID NO: 398 - DNA, 19 bp, Homo sapiens
gtgtcgagacctccgacca

SEQ ID NO: 399 - DNA, 19 bp, Homo sapiens
ggtcggaggtctcgacaca

SEQ ID NO: 400 - DNA, 19 bp, Homo sapiens
tgtgtcgagacctccgacc

SEQ ID NO: 401 - DNA, 19 bp, Homo sapiens
gtcggaggtctcgacacag

SEQ ID NO: 402 - DNA, 19 bp, Homo sapiens
ctgtgtcgagacctccgac

SEQ ID NO: 403 - DNA, 19 bp, Homo sapiens
tcggaggtctcgacacagc

SEQ ID NO: 404 - DNA, 19 bp, Homo sapiens
gctgtgtcgagacctccga

SEQ ID NO: 405 - DNA, 19 bp, Homo sapiens
cggaggtctcgacacagct

SEQ ID NO: 406 - DNA, 19 bp, Homo sapiens
agctgtgtcgagacctccg

SEQ ID NO: 407 - DNA, 19 bp, Homo sapiens
ggaggtctcgacacagctg

SEQ ID NO: 408 - DNA, 19 bp, Homo sapiens
cagctgtgtcgagacctcc

SEQ ID NO: 409 - DNA, 19 bp, Homo sapiens
gaggtctcgacacagctgg

SEQ ID NO: 410 - DNA, 19 bp, Homo sapiens
ccagctgtgtcgagacctc

SEQ ID NO: 411 - DNA, 19 bp, Homo sapiens
aggtctcgacacagctggg

SEQ ID NO: 412 - DNA, 19 bp, Homo sapiens
cccagctgtgtcgagacct

SEQ ID NO: 413 - DNA, 19 bp, Homo sapiens
ggtctcgacacagctggga

SEQ ID NO: 414 - DNA, 19 bp, Homo sapiens
tcccagctgtgtcgagacc

SEQ ID NO: 415 - DNA, 19 bp, Homo sapiens
gtctcgacacagctgggag

SEQ ID NO: 416 - DNA, 19 bp, Homo sapiens
ctcccagctgtgtcgagac

SEQ ID NO: 417 - DNA, 19 bp, Homo sapiens
tctcgacacagctgggaga

SEQ ID NO: 418 - DNA, 19 bp, Homo sapiens
tctcccagctgtgtcgaga

SEQ ID NO: 419 - DNA, 19 bp, Homo sapiens
ctcgacacagctgggagat

SEQ ID NO: 420 - DNA, 19 bp, Homo sapiens
atctcccagctgtgtcgag

SEQ ID NO: 421 - DNA, 19 bp, Homo sapiens
tcgacacagctgggagatg

SEQ ID NO: 422 - DNA, 19 bp, Homo sapiens
catctcccagctgtgtcga

SEQ ID NO: 423 - DNA, 19 bp, Homo sapiens
cgacacagctgggagatga

SEQ ID NO: 424 - DNA, 19 bp, Homo sapiens
tcatctcccagctgtgtcg

SEQ ID NO: 425 - DNA, 19 bp, Homo sapiens
gacacagctgggagatgag

SEQ ID NO: 426 - DNA, 19 bp, Homo sapiens
ctcatctcccagctgtgtc

SEQ ID NO: 427 - DNA, 19 bp, Homo sapiens
acacagctgggagatgagt

SEQ ID NO: 428 - DNA, 19 bp, Homo sapiens
actcatctcccagctgtgt

SEQ ID NO: 429 - DNA, 19 bp, Homo sapiens
cacagctgggagatgagtg

SEQ ID NO: 430 - DNA, 19 bp, Homo sapiens
cactcatctcccagctgtg

SEQ ID NO: 431 - DNA, 19 bp, Homo sapiens
acagctgggagatgagtga

SEQ ID NO: 432 - DNA, 19 bp, Homo sapiens
tcactcatctcccagctgt

SEQ ID NO: 433 - DNA, 19 bp, Homo sapiens
cagctgggagatgagtgaa

SEQ ID NO: 434 - DNA, 19 bp, Homo sapiens
ttcactcatctcccagctg

SEQ ID NO: 435 - DNA, 19 bp, Homo sapiens
agctgggagatgagtgaat

SEQ ID NO: 436 - DNA, 19 bp, Homo sapiens
attcactcatctcccagct

SEQ ID NO: 437 - DNA, 19 bp, Homo sapiens
gctgggagatgagtgaatt

SEQ ID NO: 438 - DNA, 19 bp, Homo sapiens
aattcactcatctcccagc

SEQ ID NO: 439 - DNA, 19 bp, Homo sapiens
ctgggagatgagtgaattt

SEQ ID NO: 440 - DNA, 19 bp, Homo sapiens
aaattcactcatctcccag

SEQ ID NO: 441 - DNA, 19 bp, Homo sapiens
tgggagatgagtgaatttc

SEQ ID NO: 442 - DNA, 19 bp, Homo sapiens
gaaattcactcatctccca

SEQ ID NO: 443 - DNA, 19 bp, Homo sapiens
gggagatgagtgaatttca

SEQ ID NO: 444 - DNA, 19 bp, Homo sapiens
tgaaattcactcatctccc

SEQ ID NO: 445 - DNA, 19 bp, Homo sapiens
ggagatgagtgaatttcat

SEQ ID NO: 446 - DNA, 19 bp, Homo sapiens
atgaaattcactcatctcc

SEQ ID NO: 447 - DNA, 19 bp, Homo sapiens
gagatgagtgaatttcata

SEQ ID NO: 448 - DNA, 19 bp, Homo sapiens
tatgaaattcactcatctc

SEQ ID NO: 449 - DNA, 19 bp, Homo sapiens
agatgagtgaatttcataa

SEQ ID NO: 450 - DNA, 19 bp, Homo sapiens
ttatgaaattcactcatct

SEQ ID NO: 451 - DNA, 19 bp, Homo sapiens
gatgagtgaatttcataat

SEQ ID NO: 452 - DNA, 19 bp, Homo sapiens
attatgaaattcactcatc

SEQ ID NO: 453 - DNA, 19 bp, Homo sapiens
atgagtgaatttcataatt

SEQ ID NO: 454 - DNA, 19 bp, Homo sapiens
aattatgaaattcactcat

SEQ ID NO: 455 - DNA, 19 bp, Homo sapiens
tgagtgaatttcataatta

SEQ ID NO: 456 - DNA, 19 bp, Homo sapiens
taattatgaaattcactca

SEQ ID NO: 457 - DNA, 19 bp, Homo sapiens
gagtgaatttcataattat

SEQ ID NO: 458 - DNA, 19 bp, Homo sapiens
ataattatgaaattcactc

SEQ ID NO: 459 - DNA, 19 bp, Homo sapiens
agtgaatttcataattata

SEQ ID NO: 460 - DNA, 19 bp, Homo sapiens
tataattatgaaattcact

SEQ ID NO: 461 - DNA, 19 bp, Homo sapiens
gtgaatttcataattataa

SEQ ID NO: 462 - DNA, 19 bp, Homo sapiens
ttataattatgaaattcac

SEQ ID NO: 463 - DNA, 19 bp, Homo sapiens
tgaatttcataattataac

SEQ ID NO: 464 - DNA, 19 bp, Homo sapiens
gttataattatgaaattca

SEQ ID NO: 465 - DNA, 19 bp, Homo sapiens
gaatttcataattataact

SEQ ID NO: 466 - DNA, 19 bp, Homo sapiens
agttataattatgaaattc

SEQ ID NO: 467 - DNA, 19 bp, Homo sapiens
aatttcataattataactt

SEQ ID NO: 468 - DNA, 19 bp, Homo sapiens
aagttataattatgaaatt

SEQ ID NO: 469 - DNA, 19 bp, Homo sapiens
atttcataattataacttg

SEQ ID NO: 470 - DNA, 19 bp, Homo sapiens
caagttataattatgaaat

SEQ ID NO: 471 - DNA, 19 bp, Homo sapiens
tttcataattataacttgg

SEQ ID NO: 472 - DNA, 19 bp, Homo sapiens
ccaagttataattatgaaa

SEQ ID NO: 473 - DNA, 19 bp, Homo sapiens
ttcataattataacttgga

SEQ ID NO: 474 - DNA, 19 bp, Homo sapiens
tccaagttataattatgaa

SEQ ID NO: 475 - DNA, 19 bp, Homo sapiens
tcataattataacttggat

SEQ ID NO: 476 - DNA, 19 bp, Homo sapiens
atccaagttataattatga

SEQ ID NO: 477 - DNA, 19 bp, Homo sapiens
cataattataacttggatc

SEQ ID NO: 478 - DNA, 19 bp, Homo sapiens
gatccaagttataattatg

SEQ ID NO: 479 - DNA, 19 bp, Homo sapiens
ataattataacttggatct

SEQ ID NO: 480 - DNA, 19 bp, Homo sapiens
agatccaagttataattat

SEQ ID NO: 481 - DNA, 19 bp, Homo sapiens
taattataacttggatctg

SEQ ID NO: 482 - DNA, 19 bp, Homo sapiens
cagatccaagttataatta

SEQ ID NO: 483 - DNA, 19 bp, Homo sapiens
aattataacttggatctga

SEQ ID NO: 484 - DNA, 19 bp, Homo sapiens
tcagatccaagttataatt

SEQ ID NO: 485 - DNA, 19 bp, Homo sapiens
attataacttggatctgaa

SEQ ID NO: 486 - DNA, 19 bp, Homo sapiens
ttcagatccaagttataat

SEQ ID NO: 487 - DNA, 19 bp, Homo sapiens
ttataacttggatctgaag

SEQ ID NO: 488 - DNA, 19 bp, Homo sapiens
cttcagatccaagttataa

SEQ ID NO: 489 - DNA, 19 bp, Homo sapiens
tataacttggatctgaaga

SEQ ID NO: 490 - DNA, 19 bp, Homo sapiens
tcttcagatccaagttata

SEQ ID NO: 491 - DNA, 19 bp, Homo sapiens
ataacttggatctgaagaa

SEQ ID NO: 492 - DNA, 19 bp, Homo sapiens
ttcttcagatccaagttat

SEQ ID NO: 493 - DNA, 19 bp, Homo sapiens
taacttggatctgaagaag

SEQ ID NO: 494 - DNA, 19 bp, Homo sapiens
cttcttcagatccaagtta

SEQ ID NO: 495 - DNA, 19 bp, Homo sapiens
aacttggatctgaagaaga

SEQ ID NO: 496 - DNA, 19 bp, Homo sapiens
tcttcttcagatccaagtt

SEQ ID NO: 497 - DNA, 19 bp, Homo sapiens
acttggatctgaagaagag

SEQ ID NO: 498 - DNA, 19 bp, Homo sapiens
ctcttcttcagatccaagt

SEQ ID NO: 499 - DNA, 19 bp, Homo sapiens
cttggatctgaagaagagt

SEQ ID NO: 500 - DNA, 19 bp, Homo sapiens
actcttcttcagatccaag

SEQ ID NO: 501 - DNA, 19 bp, Homo sapiens
ttggatctgaagaagagtg

SEQ ID NO: 502 - DNA, 19 bp, Homo sapiens
cactcttcttcagatccaa

SEQ ID NO: 503 - DNA, 19 bp, Homo sapiens
tggatctgaagaagagtga

SEQ ID NO: 504 - DNA, 19 bp, Homo sapiens
tcactcttcttcagatcca

SEQ ID NO: 505 - DNA, 19 bp, Homo sapiens
ggatctgaagaagagtgat

SEQ ID NO: 506 - DNA, 19 bp, Homo sapiens
atcactcttcttcagatcc

SEQ ID NO: 507 - DNA, 19 bp, Homo sapiens
gatctgaagaagagtgatt

SEQ ID NO: 508 - DNA, 19 bp, Homo sapiens
aatcactcttcttcagatc

SEQ ID NO: 509 - DNA, 19 bp, Homo sapiens
atctgaagaagagtgattt

SEQ ID NO: 510 - DNA, 19 bp, Homo sapiens
aaatcactcttcttcagat

SEQ ID NO: 511 - DNA, 19 bp, Homo sapiens
tctgaagaagagtgatttt

SEQ ID NO: 512 - DNA, 19 bp, Homo sapiens
aaaatcactcttcttcaga

SEQ ID NO: 513 - DNA, 19 bp, Homo sapiens
ctgaagaagagtgattttt

SEQ ID NO: 514 - DNA, 19 bp, Homo sapiens
aaaaatcactcttcttcag

SEQ ID NO: 515 - DNA, 19 bp, Homo sapiens
tgaagaagagtgatttttc

SEQ ID NO: 516 - DNA, 19 bp, Homo sapiens
gaaaaatcactcttcttca

SEQ ID NO: 517 - DNA, 19 bp, Homo sapiens
gaagaagagtgatttttca

SEQ ID NO: 518 - DNA, 19 bp, Homo sapiens
tgaaaaatcactcttcttc

SEQ ID NO: 519 - DNA, 19 bp, Homo sapiens
aagaagagtgatttttcaa

SEQ ID NO: 520 - DNA, 19 bp, Homo sapiens
ttgaaaaatcactcttctt

SEQ ID NO: 521 - DNA, 19 bp, Homo sapiens
agaagagtgatttttcaac

SEQ ID NO: 522 - DNA, 19 bp, Homo sapiens
gttgaaaaatcactcttct

SEQ ID NO: 523 - DNA, 19 bp, Homo sapiens
gaagagtgatttttcaaca

SEQ ID NO: 524 - DNA, 19 bp, Homo sapiens
tgttgaaaaatcactcttc

SEQ ID NO: 525 - DNA, 19 bp, Homo sapiens
aagagtgatttttcaacac

SEQ ID NO: 526 - DNA, 19 bp, Homo sapiens
gtgttgaaaaatcactctt

SEQ ID NO: 527 - DNA, 19 bp, Homo sapiens
agagtgatttttcaacacg

SEQ ID NO: 528 - DNA, 19 bp, Homo sapiens
cgtgttgaaaaatcactct

SEQ ID NO: 529 - DNA, 19 bp, Homo sapiens
gagtgatttttcaacacga

SEQ ID NO: 530 - DNA, 19 bp, Homo sapiens
tcgtgttgaaaaatcactc

SEQ ID NO: 531 - DNA, 19 bp, Homo sapiens
agtgatttttcaacacgat

SEQ ID NO: 532 - DNA, 19 bp, Homo sapiens
atcgtgttgaaaaatcact

SEQ ID NO: 533 - DNA, 19 bp, Homo sapiens
gtgatttttcaacacgatg

SEQ ID NO: 534 - DNA, 19 bp, Homo sapiens
catcgtgttgaaaaatcac

SEQ ID NO: 535 - DNA, 19 bp, Homo sapiens
tgatttttcaacacgatgg

SEQ ID NO: 536 - DNA, 19 bp, Homo sapiens
ccatcgtgttgaaaaatca

SEQ ID NO: 537 - DNA, 19 bp, Homo sapiens
gatttttcaacacgatggc

SEQ ID NO: 538 - DNA, 19 bp, Homo sapiens
gccatcgtgttgaaaaatc

SEQ ID NO: 539 - DNA, 19 bp, Homo sapiens
atttttcaacacgatggca

SEQ ID NO: 540 - DNA, 19 bp, Homo sapiens
tgccatcgtgttgaaaaat

SEQ ID NO: 541 - DNA, 19 bp, Homo sapiens
tttttcaacacgatggcaa

SEQ ID NO: 542 - DNA, 19 bp, Homo sapiens
ttgccatcgtgttgaaaaa

SEQ ID NO: 543 - DNA, 19 bp, Homo sapiens
ttttcaacacgatggcaaa

SEQ ID NO: 544 - DNA, 19 bp, Homo sapiens
tttgccatcgtgttgaaaa

SEQ ID NO: 545 - DNA, 19 bp, Homo sapiens
tttcaacacgatggcaaaa

SEQ ID NO: 546 - DNA, 19 bp, Homo sapiens
ttttgccatcgtgttgaaa

SEQ ID NO: 547 - DNA, 19 bp, Homo sapiens
ttcaacacgatggcaaaag

SEQ ID NO: 548 - DNA, 19 bp, Homo sapiens
cttttgccatcgtgttgaa

SEQ ID NO: 549 - DNA, 19 bp, Homo sapiens
tcaacacgatggcaaaagc

SEQ ID NO: 550 - DNA, 19 bp, Homo sapiens
gcttttgccatcgtgttga

SEQ ID NO: 551 - DNA, 19 bp, Homo sapiens
caacacgatggcaaaagca

SEQ ID NO: 552 - DNA, 19 bp, Homo sapiens
tgcttttgccatcgtgttg

SEQ ID NO: 553 - DNA, 19 bp, Homo sapiens
aacacgatggcaaaagcaa

SEQ ID NO: 554 - DNA, 19 bp, Homo sapiens
ttgcttttgccatcgtgtt

SEQ ID NO: 555 - DNA, 19 bp, Homo sapiens
acacgatggcaaaagcaaa

SEQ ID NO: 556 - DNA, 19 bp, Homo sapiens
tttgcttttgccatcgtgt

SEQ ID NO: 557 - DNA, 19 bp, Homo sapiens
cacgatggcaaaagcaaag

SEQ ID NO: 558 - DNA, 19 bp, Homo sapiens
ctttgcttttgccatcgtg

SEQ ID NO: 559 - DNA, 19 bp, Homo sapiens
acgatggcaaaagcaaaga

SEQ ID NO: 560 - DNA, 19 bp, Homo sapiens
tctttgcttttgccatcgt

SEQ ID NO: 561 - DNA, 19 bp, Homo sapiens
cgatggcaaaagcaaagat

SEQ ID NO: 562 - DNA, 19 bp, Homo sapiens
atctttgcttttgccatcg

SEQ ID NO: 563 - DNA, 19 bp, Homo sapiens
gatggcaaaagcaaagatg

SEQ ID NO: 564 - DNA, 19 bp, Homo sapiens
catctttgcttttgccatc

SEQ ID NO: 565 - DNA, 19 bp, Homo sapiens
atggcaaaagcaaagatgt

SEQ ID NO: 566 - DNA, 19 bp, Homo sapiens
acatctttgcttttgccat

SEQ ID NO: 567 - DNA, 19 bp, Homo sapiens
tggcaaaagcaaagatgtc

SEQ ID NO: 568 - DNA, 19 bp, Homo sapiens
gacatctttgcttttgcca

SEQ ID NO: 569 - DNA, 19 bp, Homo sapiens
ggcaaaagcaaagatgtcc

SEQ ID NO: 570 - DNA, 19 bp, Homo sapiens
ggacatctttgcttttgcc

SEQ ID NO: 571 - DNA, 19 bp, Homo sapiens
gcaaaagcaaagatgtcca

SEQ ID NO: 572 - DNA, 19 bp, Homo sapiens
tggacatctttgcttttgc

SEQ ID NO: 573 - DNA, 19 bp, Homo sapiens
caaaagcaaagatgtccag

SEQ ID NO: 574 - DNA, 19 bp, Homo sapiens
ctggacatctttgcttttg

SEQ ID NO: 575 - DNA, 19 bp, Homo sapiens
aaaagcaaagatgtccagt

SEQ ID NO: 576 - DNA, 19 bp, Homo sapiens
actggacatctttgctttt

SEQ ID NO: 577 - DNA, 19 bp, Homo sapiens
aaagcaaagatgtccagta

SEQ ID NO: 578 - DNA, 19 bp, Homo sapiens
tactggacatctttgcttt

SEQ ID NO: 579 - DNA, 19 bp, Homo sapiens
aagcaaagatgtccagtag

SEQ ID NO: 580 - DNA, 19 bp, Homo sapiens
ctactggacatctttgctt

SEQ ID NO: 581 - DNA, 19 bp, Homo sapiens
agcaaagatgtccagtagt

SEQ ID NO: 582 - DNA, 19 bp, Homo sapiens
actactggacatctttgct

SEQ ID NO: 583 - DNA, 19 bp, Homo sapiens
gcaaagatgtccagtagtc

SEQ ID NO: 584 - DNA, 19 bp, Homo sapiens
gactactggacatctttgc

SEQ ID NO: 585 - DNA, 19 bp, Homo sapiens
caaagatgtccagtagtca

SEQ ID NO: 586 - DNA, 19 bp, Homo sapiens
tgactactggacatctttg

SEQ ID NO: 587 - DNA, 19 bp, Homo sapiens
aaagatgtccagtagtcaa

SEQ ID NO: 588 - DNA, 19 bp, Homo sapiens
ttgactactggacatcttt

SEQ ID NO: 589 - DNA, 19 bp, Homo sapiens
aagatgtccagtagtcaaa

SEQ ID NO: 590 - DNA, 19 bp, Homo sapiens
tttgactactggacatctt

SEQ ID NO: 591 - DNA, 19 bp, Homo sapiens
agatgtccagtagtcaaaa

SEQ ID NO: 592 - DNA, 19 bp, Homo sapiens
ttttgactactggacatct

SEQ ID NO: 593 - DNA, 19 bp, Homo sapiens
gatgtccagtagtcaaaag

SEQ ID NO: 594 - DNA, 19 bp, Homo sapiens
cttttgactactggacatc

SEQ ID NO: 595 - DNA, 19 bp, Homo sapiens
atgtccagtagtcaaaagc

SEQ ID NO: 596 - DNA, 19 bp, Homo sapiens
gcttttgactactggacat

SEQ ID NO: 597 - DNA, 19 bp, Homo sapiens
tgtccagtagtcaaaagca

SEQ ID NO: 598 - DNA, 19 bp, Homo sapiens
tgcttttgactactggaca

SEQ ID NO: 599 - DNA, 19 bp, Homo sapiens
gtccagtagtcaaaagcaa

SEQ ID NO: 600 - DNA, 19 bp, Homo sapiens
ttgcttttgactactggac

SEQ ID NO: 601 - DNA, 19 bp, Homo sapiens
tccagtagtcaaaagcaaa

SEQ ID NO: 602 - DNA, 19 bp, Homo sapiens
tttgcttttgactactgga

SEQ ID NO: 603 - DNA, 19 bp, Homo sapiens
ccagtagtcaaaagcaaat

SEQ ID NO: 604 - DNA, 19 bp, Homo sapiens
atttgcttttgactactgg

SEQ ID NO: 605 - DNA, 19 bp, Homo sapiens
cagtagtcaaaagcaaatg

SEQ ID NO: 606 - DNA, 19 bp, Homo sapiens
catttgcttttgactactg

SEQ ID NO: 607 - DNA, 19 bp, Homo sapiens
agtagtcaaaagcaaatgt

SEQ ID NO: 608 - DNA, 19 bp, Homo sapiens
acatttgcttttgactact

SEQ ID NO: 609 - DNA, 19 bp, Homo sapiens
gtagtcaaaagcaaatgta

SEQ ID NO: 610 - DNA, 19 bp, Homo sapiens
tacatttgcttttgactac

SEQ ID NO: 611 - DNA, 19 bp, Homo sapiens
tagtcaaaagcaaatgtag

SEQ ID NO: 612 - DNA, 19 bp, Homo sapiens
ctacatttgcttttgacta

SEQ ID NO: 613 - DNA, 19 bp, Homo sapiens
agtcaaaagcaaatgtaga

SEQ ID NO: 614 - DNA, 19 bp, Homo sapiens
tctacatttgcttttgact

SEQ ID NO: 615 - DNA, 19 bp, Homo sapiens
gtcaaaagcaaatgtagag

SEQ ID NO: 616 - DNA, 19 bp, Homo sapiens
ctctacatttgcttttgac

SEQ ID NO: 617 - DNA, 19 bp, Homo sapiens
tcaaaagcaaatgtagaga

SEQ ID NO: 618 - DNA, 19 bp, Homo sapiens
tctctacatttgcttttga

SEQ ID NO: 619 - DNA, 19 bp, Homo sapiens
caaaagcaaatgtagagaa

SEQ ID NO: 620 - DNA, 19 bp, Homo sapiens
ttctctacatttgcttttg

SEQ ID NO: 621 - DNA, 19 bp, Homo sapiens
aaaagcaaatgtagagaaa

SEQ ID NO: 622 - DNA, 19 bp, Homo sapiens
tttctctacatttgctttt

SEQ ID NO: 623 - DNA, 19 bp, Homo sapiens
aaagcaaatgtagagaaaa

SEQ ID NO: 624 - DNA, 19 bp, Homo sapiens
ttttctctacatttgcttt

SEQ ID NO: 625 - DNA, 19 bp, Homo sapiens
aagcaaatgtagagaaaat

SEQ ID NO: 626 - DNA, 19 bp, Homo sapiens
attttctctacatttgctt

SEQ ID NO: 627 - DNA, 19 bp, Homo sapiens
agcaaatgtagagaaaatg

SEQ ID NO: 628 - DNA, 19 bp, Homo sapiens
cattttctctacatttgct

SEQ ID NO: 629 - DNA, 19 bp, Homo sapiens
gcaaatgtagagaaaatgc

SEQ ID NO: 630 - DNA, 19 bp, Homo sapiens
gcattttctctacatttgc

SEQ ID NO: 631 - DNA, 19 bp, Homo sapiens
caaatgtagagaaaatgca

SEQ ID NO: 632 - DNA, 19 bp, Homo sapiens
tgcattttctctacatttg

SEQ ID NO: 633 - DNA, 19 bp, Homo sapiens
aaatgtagagaaaatgcat

SEQ ID NO: 634 - DNA, 19 bp, Homo sapiens
atgcattttctctacattt

SEQ ID NO: 635 - DNA, 19 bp, Homo sapiens
aatgtagagaaaatgcatc

SEQ ID NO: 636 - DNA, 19 bp, Homo sapiens
gatgcattttctctacatt

SEQ ID NO: 637 - DNA, 19 bp, Homo sapiens
atgtagagaaaatgcatct

SEQ ID NO: 638 - DNA, 19 bp, Homo sapiens
agatgcattttctctacat

SEQ ID NO: 639 - DNA, 19 bp, Homo sapiens
tgtagagaaaatgcatctc

SEQ ID NO: 640 - DNA, 19 bp, Homo sapiens
gagatgcattttctctaca

SEQ ID NO: 641 - DNA, 19 bp, Homo sapiens
gtagagaaaatgcatctcc

SEQ ID NO: 642 - DNA, 19 bp, Homo sapiens
ggagatgcattttctctac

SEQ ID NO: 643 - DNA, 19 bp, Homo sapiens
tagagaaaatgcatctcca

SEQ ID NO: 644 - DNA, 19 bp, Homo sapiens
tggagatgcattttctcta

SEQ ID NO: 645 - DNA, 19 bp, Homo sapiens
agagaaaatgcatctccat

SEQ ID NO: 646 - DNA, 19 bp, Homo sapiens
atggagatgcattttctct

SEQ ID NO: 647 - DNA, 19 bp, Homo sapiens
gagaaaatgcatctccatt

SEQ ID NO: 648 - DNA, 19 bp, Homo sapiens
aatggagatgcattttctc

SEQ ID NO: 649 - DNA, 19 bp, Homo sapiens
agaaaatgcatctccattt

SEQ ID NO: 650 - DNA, 19 bp, Homo sapiens
aaatggagatgcattttct

SEQ ID NO: 651 - DNA, 19 bp, Homo sapiens
gaaaatgcatctccatttt

SEQ ID NO: 652 - DNA, 19 bp, Homo sapiens
aaaatggagatgcattttc

SEQ ID NO: 653 - DNA, 19 bp, Homo sapiens
aaaatgcatctccattttt

SEQ ID NO: 654 - DNA, 19 bp, Homo sapiens
aaaaatggagatgcatttt

SEQ ID NO: 655 - DNA, 19 bp, Homo sapiens
aaatgcatctccatttttt

SEQ ID NO: 656 - DNA, 19 bp, Homo sapiens
aaaaaatggagatgcattt

SEQ ID NO: 657 - DNA, 19 bp, Homo sapiens
aatgcatctccattttttt

SEQ ID NO: 658 - DNA, 19 bp, Homo sapiens
aaaaaaatggagatgcatt

SEQ ID NO: 659 - DNA, 19 bp, Homo sapiens
atgcatctccatttttttt

SEQ ID NO: 660 - DNA, 19 bp, Homo sapiens
aaaaaaaatggagatgcat

SEQ ID NO: 661 - DNA, 19 bp, Homo sapiens
tgcatctccattttttttc

SEQ ID NO: 662 - DNA, 19 bp, Homo sapiens
gaaaaaaaatggagatgca

SEQ ID NO: 663 - DNA, 19 bp, Homo sapiens
gcatctccattttttttct

SEQ ID NO: 664 - DNA, 19 bp, Homo sapiens
agaaaaaaaatggagatgc

SEQ ID NO: 665 - DNA, 19 bp, Homo sapiens
catctccattttttttctg

SEQ ID NO: 666 - DNA, 19 bp, Homo sapiens
cagaaaaaaaatggagatg

SEQ ID NO: 667 - DNA, 19 bp, Homo sapiens
atctccattttttttctgc

SEQ ID NO: 668 - DNA, 19 bp, Homo sapiens
gcagaaaaaaaatggagat

SEQ ID NO: 669 - DNA, 19 bp, Homo sapiens
tctccattttttttctgct

SEQ ID NO: 670 - DNA, 19 bp, Homo sapiens
agcagaaaaaaaatggaga

SEQ ID NO: 671 - DNA, 19 bp, Homo sapiens
ctccattttttttctgctg

SEQ ID NO: 672 - DNA, 19 bp, Homo sapiens
cagcagaaaaaaaatggag

SEQ ID NO: 673 - DNA, 19 bp, Homo sapiens
tccattttttttctgctgc

SEQ ID NO: 674 - DNA, 19 bp, Homo sapiens
gcagcagaaaaaaaatgga

SEQ ID NO: 675 - DNA, 19 bp, Homo sapiens
ccattttttttctgctgct

SEQ ID NO: 676 - DNA, 19 bp, Homo sapiens
agcagcagaaaaaaaatgg

SEQ ID NO: 677 - DNA, 19 bp, Homo sapiens
cattttttttctgctgctt

SEQ ID NO: 678 - DNA, 19 bp, Homo sapiens
aagcagcagaaaaaaaatg

SEQ ID NO: 679 - DNA, 19 bp, Homo sapiens
attttttttctgctgcttc

SEQ ID NO: 680 - DNA, 19 bp, Homo sapiens
gaagcagcagaaaaaaaat

SEQ ID NO: 681 - DNA, 19 bp, Homo sapiens
ttttttttctgctgcttca

SEQ ID NO: 682 - DNA, 19 bp, Homo sapiens
tgaagcagcagaaaaaaaa

SEQ ID NO: 683 - DNA, 19 bp, Homo sapiens
tttttttctgctgcttcat

SEQ ID NO: 684 - DNA, 19 bp, Homo sapiens
atgaagcagcagaaaaaaa

SEQ ID NO: 685 - DNA, 19 bp, Homo sapiens
ttttttctgctgcttcatc

SEQ ID NO: 686 - DNA, 19 bp, Homo sapiens
gatgaagcagcagaaaaaa

SEQ ID NO: 687 - DNA, 19 bp, Homo sapiens
tttttctgctgcttcatcg

SEQ ID NO: 688 - DNA, 19 bp, Homo sapiens
cgatgaagcagcagaaaaa

SEQ ID NO: 689 - DNA, 19 bp, Homo sapiens
ttttctgctgcttcatcgc

SEQ ID NO: 690 - DNA, 19 bp, Homo sapiens
gcgatgaagcagcagaaaa

SEQ ID NO: 691 - DNA, 19 bp, Homo sapiens
tttctgctgcttcatcgct

SEQ ID NO: 692 - DNA, 19 bp, Homo sapiens
agcgatgaagcagcagaaa

SEQ ID NO: 693 - DNA, 19 bp, Homo sapiens
ttctgctgcttcatcgctg

SEQ ID NO: 694 - DNA, 19 bp, Homo sapiens
cagcgatgaagcagcagaa

SEQ ID NO: 695 - DNA, 19 bp, Homo sapiens
tctgctgcttcatcgctgt

SEQ ID NO: 696 - DNA, 19 bp, Homo sapiens
acagcgatgaagcagcaga

SEQ ID NO: 697 - DNA, 19 bp, Homo sapiens
ctgctgcttcatcgctgta

SEQ ID NO: 698 - DNA, 19 bp, Homo sapiens
tacagcgatgaagcagcag

SEQ ID NO: 699 - DNA, 19 bp, Homo sapiens
tgctgcttcatcgctgtag

SEQ ID NO: 700 - DNA, 19 bp, Homo sapiens
ctacagcgatgaagcagca

SEQ ID NO: 701 - DNA, 19 bp, Homo sapiens
gctgcttcatcgctgtagc

SEQ ID NO: 702 - DNA, 19 bp, Homo sapiens
gctacagcgatgaagcagc

SEQ ID NO: 703 - DNA, 19 bp, Homo sapiens
ctgcttcatcgctgtagcc

SEQ ID NO: 704 - DNA, 19 bp, Homo sapiens
ggctacagcgatgaagcag

SEQ ID NO: 705 - DNA, 19 bp, Homo sapiens
tgcttcatcgctgtagcca

SEQ ID NO: 706 - DNA, 19 bp, Homo sapiens
tggctacagcgatgaagca

SEQ ID NO: 707 - DNA, 19 bp, Homo sapiens
gcttcatcgctgtagccat

SEQ ID NO: 708 - DNA, 19 bp, Homo sapiens
atggctacagcgatgaagc

SEQ ID NO: 709 - DNA, 19 bp, Homo sapiens
cttcatcgctgtagccatg

SEQ ID NO: 710 - DNA, 19 bp, Homo sapiens
catggctacagcgatgaag

SEQ ID NO: 711 - DNA, 19 bp, Homo sapiens
ttcatcgctgtagccatgg

SEQ ID NO: 712 - DNA, 19 bp, Homo sapiens
ccatggctacagcgatgaa

SEQ ID NO: 713 - DNA, 19 bp, Homo sapiens
tcatcgctgtagccatggg

SEQ ID NO: 714 - DNA, 19 bp, Homo sapiens
cccatggctacagcgatga

SEQ ID NO: 715 - DNA, 19 bp, Homo sapiens
catcgctgtagccatggga

SEQ ID NO: 716 - DNA, 19 bp, Homo sapiens
tcccatggctacagcgatg

SEQ ID NO: 717 - DNA, 19 bp, Homo sapiens
atcgctgtagccatgggaa

SEQ ID NO: 718 - DNA, 19 bp, Homo sapiens
ttcccatggctacagcgat

SEQ ID NO: 719 - DNA, 19 bp, Homo sapiens
tcgctgtagccatgggaat

SEQ ID NO: 720 - DNA, 19 bp, Homo sapiens
attcccatggctacagcga

SEQ ID NO: 721 - DNA, 19 bp, Homo sapiens
cgctgtagccatgggaatc

SEQ ID NO: 722 - DNA, 19 bp, Homo sapiens
gattcccatggctacagcg

SEQ ID NO: 723 - DNA, 19 bp, Homo sapiens
gctgtagccatgggaatcc

SEQ ID NO: 724 - DNA, 19 bp, Homo sapiens
ggattcccatggctacagc

SEQ ID NO: 725 - DNA, 19 bp, Homo sapiens
ctgtagccatgggaatccg

SEQ ID NO: 726 - DNA, 19 bp, Homo sapiens
cggattcccatggctacag

SEQ ID NO: 727 - DNA, 19 bp, Homo sapiens
tgtagccatgggaatccgt

SEQ ID NO: 728 - DNA, 19 bp, Homo sapiens
acggattcccatggctaca

SEQ ID NO: 729 - DNA, 19 bp, Homo sapiens
gtagccatgggaatccgtt

SEQ ID NO: 730 - DNA, 19 bp, Homo sapiens
aacggattcccatggctac

SEQ ID NO: 731 - DNA, 19 bp, Homo sapiens
tagccatgggaatccgttt

SEQ ID NO: 732 - DNA, 19 bp, Homo sapiens
aaacggattcccatggcta

SEQ ID NO: 733 - DNA, 19 bp, Homo sapiens
agccatgggaatccgtttc

SEQ ID NO: 734 - DNA, 19 bp, Homo sapiens
gaaacggattcccatggct

SEQ ID NO: 735 - DNA, 19 bp, Homo sapiens
gccatgggaatccgtttca

SEQ ID NO: 736 - DNA, 19 bp, Homo sapiens
tgaaacggattcccatggc

SEQ ID NO: 737 - DNA, 19 bp, Homo sapiens
ccatgggaatccgtttcat

SEQ ID NO: 738 - DNA, 19 bp, Homo sapiens
atgaaacggattcccatgg

SEQ ID NO: 739 - DNA, 19 bp, Homo sapiens
catgggaatccgtttcatt

SEQ ID NO: 740 - DNA, 19 bp, Homo sapiens
aatgaaacggattcccatg

SEQ ID NO: 741 - DNA, 19 bp, Homo sapiens
atgggaatccgtttcatta

SEQ ID NO: 742 - DNA, 19 bp, Homo sapiens
taatgaaacggattcccat

SEQ ID NO: 743 - DNA, 19 bp, Homo sapiens
tgggaatccgtttcattat

SEQ ID NO: 744 - DNA, 19 bp, Homo sapiens
ataatgaaacggattccca

SEQ ID NO: 745 - DNA, 19 bp, Homo sapiens
gggaatccgtttcattatt

SEQ ID NO: 746 - DNA, 19 bp, Homo sapiens
aataatgaaacggattccc

SEQ ID NO: 747 - DNA, 19 bp, Homo sapiens
ggaatccgtttcattatta

SEQ ID NO: 748 - DNA, 19 bp, Homo sapiens
taataatgaaacggattcc

SEQ ID NO: 749 - DNA, 19 bp, Homo sapiens
gaatccgtttcattattat

SEQ ID NO: 750 - DNA, 19 bp, Homo sapiens
ataataatgaaacggattc

SEQ ID NO: 751 - DNA, 19 bp, Homo sapiens
aatccgtttcattattatg

SEQ ID NO: 752 - DNA, 19 bp, Homo sapiens
cataataatgaaacggatt

SEQ ID NO: 753 - DNA, 19 bp, Homo sapiens
atccgtttcattattatgg

SEQ ID NO: 754 - DNA, 19 bp, Homo sapiens
ccataataatgaaacggat

SEQ ID NO: 755 - DNA, 19 bp, Homo sapiens
tccgtttcattattatggt

SEQ ID NO: 756 - DNA, 19 bp, Homo sapiens
accataataatgaaacgga

SEQ ID NO: 757 - DNA, 19 bp, Homo sapiens
ccgtttcattattatggta

SEQ ID NO: 758 - DNA, 19 bp, Homo sapiens
taccataataatgaaacgg

SEQ ID NO: 759 - DNA, 19 bp, Homo sapiens
cgtttcattattatggtaa

SEQ ID NO: 760 - DNA, 19 bp, Homo sapiens
ttaccataataatgaaacg

SEQ ID NO: 761 - DNA, 19 bp, Homo sapiens
gtttcattattatggtaac

SEQ ID NO: 762 - DNA, 19 bp, Homo sapiens
gttaccataataatgaaac

SEQ ID NO: 763 - DNA, 19 bp, Homo sapiens
tttcattattatggtaaca

SEQ ID NO: 764 - DNA, 19 bp, Homo sapiens
tgttaccataataatgaaa

SEQ ID NO: 765 - DNA, 19 bp, Homo sapiens
ttcattattatggtaacaa

SEQ ID NO: 766 - DNA, 19 bp, Homo sapiens
ttgttaccataataatgaa

SEQ ID NO: 767 - DNA, 19 bp, Homo sapiens
tcattattatggtaacaat

SEQ ID NO: 768 - DNA, 19 bp, Homo sapiens
attgttaccataataatga

SEQ ID NO: 769 - DNA, 19 bp, Homo sapiens
cattattatggtaacaata

SEQ ID NO: 770 - DNA, 19 bp, Homo sapiens
tattgttaccataataatg

SEQ ID NO: 771 - DNA, 19 bp, Homo sapiens
attattatggtaacaatat

SEQ ID NO: 772 - DNA, 19 bp, Homo sapiens
atattgttaccataataat

SEQ ID NO: 773 - DNA, 19 bp, Homo sapiens
ttattatggtaacaatatg

SEQ ID NO: 774 - DNA, 19 bp, Homo sapiens
catattgttaccataataa

SEQ ID NO: 775 - DNA, 19 bp, Homo sapiens
tattatggtaacaatatgg

SEQ ID NO: 776 - DNA, 19 bp, Homo sapiens
ccatattgttaccataata

SEQ ID NO: 777 - DNA, 19 bp, Homo sapiens
attatggtaacaatatgga

SEQ ID NO: 778 - DNA, 19 bp, Homo sapiens
tccatattgttaccataat

SEQ ID NO: 779 - DNA, 19 bp, Homo sapiens
ttatggtaacaatatggag

SEQ ID NO: 780 - DNA, 19 bp, Homo sapiens
ctccatattgttaccataa

SEQ ID NO: 781 - DNA, 19 bp, Homo sapiens
tatggtaacaatatggagt

SEQ ID NO: 782 - DNA, 19 bp, Homo sapiens
actccatattgttaccata

SEQ ID NO: 783 - DNA, 19 bp, Homo sapiens
atggtaacaatatggagtg

SEQ ID NO: 784 - DNA, 19 bp, Homo sapiens
cactccatattgttaccat

SEQ ID NO: 785 - DNA, 19 bp, Homo sapiens
tggtaacaatatggagtgc

SEQ ID NO: 786 - DNA, 19 bp, Homo sapiens
gcactccatattgttacca

SEQ ID NO: 787 - DNA, 19 bp, Homo sapiens
ggtaacaatatggagtgct

SEQ ID NO: 788 - DNA, 19 bp, Homo sapiens
agcactccatattgttacc

SEQ ID NO: 789 - DNA, 19 bp, Homo sapiens
gtaacaatatggagtgctg

SEQ ID NO: 790 - DNA, 19 bp, Homo sapiens
cagcactccatattgttac

SEQ ID NO: 791 - DNA, 19 bp, Homo sapiens
taacaatatggagtgctgt

SEQ ID NO: 792 - DNA, 19 bp, Homo sapiens
acagcactccatattgtta

SEQ ID NO: 793 - DNA, 19 bp, Homo sapiens
aacaatatggagtgctgta

SEQ ID NO: 794 - DNA, 19 bp, Homo sapiens
tacagcactccatattgtt

SEQ ID NO: 795 - DNA, 19 bp, Homo sapiens
acaatatggagtgctgtat

SEQ ID NO: 796 - DNA, 19 bp, Homo sapiens
atacagcactccatattgt

SEQ ID NO: 797 - DNA, 19 bp, Homo sapiens
caatatggagtgctgtatt

SEQ ID NO: 798 - DNA, 19 bp, Homo sapiens
aatacagcactccatattg

SEQ ID NO: 799 - DNA, 19 bp, Homo sapiens
aatatggagtgctgtattc

SEQ ID NO: 800 - DNA, 19 bp, Homo sapiens
gaatacagcactccatatt

SEQ ID NO: 801 - DNA, 19 bp, Homo sapiens
atatggagtgctgtattcc

SEQ ID NO: 802 - DNA, 19 bp, Homo sapiens
ggaatacagcactccatat

SEQ ID NO: 803 - DNA, 19 bp, Homo sapiens
tatggagtgctgtattcct

SEQ ID NO: 804 - DNA, 19 bp, Homo sapiens
aggaatacagcactccata

SEQ ID NO: 805 - DNA, 19 bp, Homo sapiens
atggagtgctgtattccta

SEQ ID NO: 806 - DNA, 19 bp, Homo sapiens
taggaatacagcactccat

SEQ ID NO: 807 - DNA, 19 bp, Homo sapiens
tggagtgctgtattcctaa

SEQ ID NO: 808 - DNA, 19 bp, Homo sapiens
ttaggaatacagcactcca

SEQ ID NO: 809 - DNA, 19 bp, Homo sapiens
ggagtgctgtattcctaaa

SEQ ID NO: 810 - DNA, 19 bp, Homo sapiens
tttaggaatacagcactcc

SEQ ID NO: 811 - DNA, 19 bp, Homo sapiens
gagtgctgtattcctaaac

SEQ ID NO: 812 - DNA, 19 bp, Homo sapiens
gtttaggaatacagcactc

SEQ ID NO: 813 - DNA, 19 bp, Homo sapiens
agtgctgtattcctaaact

SEQ ID NO: 814 - DNA, 19 bp, Homo sapiens
agtttaggaatacagcact

SEQ ID NO: 815 - DNA, 19 bp, Homo sapiens
gtgctgtattcctaaactc

SEQ ID NO: 816 - DNA, 19 bp, Homo sapiens
gagtttaggaatacagcac

SEQ ID NO: 817 - DNA, 19 bp, Homo sapiens
tgctgtattcctaaactca

SEQ ID NO: 818 - DNA, 19 bp, Homo sapiens
tgagtttaggaatacagca

SEQ ID NO: 819 - DNA, 19 bp, Homo sapiens
gctgtattcctaaactcat

SEQ ID NO: 820 - DNA, 19 bp, Homo sapiens
atgagtttaggaatacagc

SEQ ID NO: 821 - DNA, 19 bp, Homo sapiens
ctgtattcctaaactcatt

SEQ ID NO: 822 - DNA, 19 bp, Homo sapiens
aatgagtttaggaatacag

SEQ ID NO: 823 - DNA, 19 bp, Homo sapiens
tgtattcctaaactcatta

SEQ ID NO: 824 - DNA, 19 bp, Homo sapiens
taatgagtttaggaataca

SEQ ID NO: 825 - DNA, 19 bp, Homo sapiens
gtattcctaaactcattat

SEQ ID NO: 826 - DNA, 19 bp, Homo sapiens
ataatgagtttaggaatac

SEQ ID NO: 827 - DNA, 19 bp, Homo sapiens
tattcctaaactcattatt

SEQ ID NO: 828 - DNA, 19 bp, Homo sapiens
aataatgagtttaggaata

SEQ ID NO: 829 - DNA, 19 bp, Homo sapiens
attcctaaactcattattc

SEQ ID NO: 830 - DNA, 19 bp, Homo sapiens
gaataatgagtttaggaat

SEQ ID NO: 831 - DNA, 19 bp, Homo sapiens
ttcctaaactcattattca

SEQ ID NO: 832 - DNA, 19 bp, Homo sapiens
tgaataatgagtttaggaa

SEQ ID NO: 833 - DNA, 19 bp, Homo sapiens
tcctaaactcattattcaa

SEQ ID NO: 834 - DNA, 19 bp, Homo sapiens
ttgaataatgagtttagga

SEQ ID NO: 835 - DNA, 19 bp, Homo sapiens
cctaaactcattattcaac

SEQ ID NO: 836 - DNA, 19 bp, Homo sapiens
gttgaataatgagtttagg

SEQ ID NO: 837 - DNA, 19 bp, Homo sapiens
ctaaactcattattcaacc

SEQ ID NO: 838 - DNA, 19 bp, Homo sapiens
ggttgaataatgagtttag

SEQ ID NO: 839 - DNA, 19 bp, Homo sapiens
taaactcattattcaacca

SEQ ID NO: 840 - DNA, 19 bp, Homo sapiens
tggttgaataatgagttta

SEQ ID NO: 841 - DNA, 19 bp, Homo sapiens
aaactcattattcaaccaa

SEQ ID NO: 842 - DNA, 19 bp, Homo sapiens
ttggttgaataatgagttt

SEQ ID NO: 843 - DNA, 19 bp, Homo sapiens
aactcattattcaaccaag

SEQ ID NO: 844 - DNA, 19 bp, Homo sapiens
cttggttgaataatgagtt

SEQ ID NO: 845 - DNA, 19 bp, Homo sapiens
actcattattcaaccaaga

SEQ ID NO: 846 - DNA, 19 bp, Homo sapiens
tcttggttgaataatgagt

SEQ ID NO: 847 - DNA, 19 bp, Homo sapiens
ctcattattcaaccaagaa

SEQ ID NO: 848 - DNA, 19 bp, Homo sapiens
ttcttggttgaataatgag

SEQ ID NO: 849 - DNA, 19 bp, Homo sapiens
tcattattcaaccaagaag

SEQ ID NO: 850 - DNA, 19 bp, Homo sapiens
cttcttggttgaataatga

SEQ ID NO: 851 - DNA, 19 bp, Homo sapiens
cattattcaaccaagaagt

SEQ ID NO: 852 - DNA, 19 bp, Homo sapiens
acttcttggttgaataatg

SEQ ID NO: 853 - DNA, 19 bp, Homo sapiens
attattcaaccaagaagtt

SEQ ID NO: 854 - DNA, 19 bp, Homo sapiens
aacttcttggttgaataat

SEQ ID NO: 855 - DNA, 19 bp, Homo sapiens
ttattcaaccaagaagttc

SEQ ID NO: 856 - DNA, 19 bp, Homo sapiens
gaacttcttggttgaataa

SEQ ID NO: 857 - DNA, 19 bp, Homo sapiens
tattcaaccaagaagttca

SEQ ID NO: 858 - DNA, 19 bp, Homo sapiens
tgaacttcttggttgaata

SEQ ID NO: 859 - DNA, 19 bp, Homo sapiens
attcaaccaagaagttcaa

SEQ ID NO: 860 - DNA, 19 bp, Homo sapiens
ttgaacttcttggttgaat

SEQ ID NO: 861 - DNA, 19 bp, Homo sapiens
ttcaaccaagaagttcaaa

SEQ ID NO: 862 - DNA, 19 bp, Homo sapiens
tttgaacttcttggttgaa

SEQ ID NO: 863 - DNA, 19 bp, Homo sapiens
tcaaccaagaagttcaaat

SEQ ID NO: 864 - DNA, 19 bp, Homo sapiens
atttgaacttcttggttga

SEQ ID NO: 865 - DNA, 19 bp, Homo sapiens
caaccaagaagttcaaatt

SEQ ID NO: 866 - DNA, 19 bp, Homo sapiens
aatttgaacttcttggttg

SEQ ID NO: 867 - DNA, 19 bp, Homo sapiens
aaccaagaagttcaaattc

SEQ ID NO: 868 - DNA, 19 bp, Homo sapiens
gaatttgaacttcttggtt

SEQ ID NO: 869 - DNA, 19 bp, Homo sapiens
accaagaagttcaaattcc

SEQ ID NO: 870 - DNA, 19 bp, Homo sapiens
ggaatttgaacttcttggt

SEQ ID NO: 871 - DNA, 19 bp, Homo sapiens
ccaagaagttcaaattccc

SEQ ID NO: 872 - DNA, 19 bp, Homo sapiens
gggaatttgaacttcttgg

SEQ ID NO: 873 - DNA, 19 bp, Homo sapiens
caagaagttcaaattccct

SEQ ID NO: 874 - DNA, 19 bp, Homo sapiens
agggaatttgaacttcttg

SEQ ID NO: 875 - DNA, 19 bp, Homo sapiens
aagaagttcaaattccctt

SEQ ID NO: 876 - DNA, 19 bp, Homo sapiens
aagggaatttgaacttctt

SEQ ID NO: 877 - DNA, 19 bp, Homo sapiens
agaagttcaaattcccttg

SEQ ID NO: 878 - DNA, 19 bp, Homo sapiens
caagggaatttgaacttct

SEQ ID NO: 879 - DNA, 19 bp, Homo sapiens
gaagttcaaattcccttga

SEQ ID NO: 880 - DNA, 19 bp, Homo sapiens
tcaagggaatttgaacttc

SEQ ID NO: 881 - DNA, 19 bp, Homo sapiens
aagttcaaattcccttgac

SEQ ID NO: 882 - DNA, 19 bp, Homo sapiens
gtcaagggaatttgaactt

SEQ ID NO: 883 - DNA, 19 bp, Homo sapiens
agttcaaattcccttgacc

SEQ ID NO: 884 - DNA, 19 bp, Homo sapiens
ggtcaagggaatttgaact

SEQ ID NO: 885 - DNA, 19 bp, Homo sapiens
gttcaaattcccttgaccg

SEQ ID NO: 886 - DNA, 19 bp, Homo sapiens
cggtcaagggaatttgaac

SEQ ID NO: 887 - DNA, 19 bp, Homo sapiens
ttcaaattcccttgaccga

SEQ ID NO: 888 - DNA, 19 bp, Homo sapiens
tcggtcaagggaatttgaa

SEQ ID NO: 889 - DNA, 19 bp, Homo sapiens
tcaaattcccttgaccgaa

SEQ ID NO: 890 - DNA, 19 bp, Homo sapiens
ttcggtcaagggaatttga

SEQ ID NO: 891 - DNA, 19 bp, Homo sapiens
caaattcccttgaccgaaa

SEQ ID NO: 892 - DNA, 19 bp, Homo sapiens
tttcggtcaagggaatttg

SEQ ID NO: 893 - DNA, 19 bp, Homo sapiens
aaattcccttgaccgaaag

SEQ ID NO: 894 - DNA, 19 bp, Homo sapiens
ctttcggtcaagggaattt

SEQ ID NO: 895 - DNA, 19 bp, Homo sapiens
aattcccttgaccgaaagt

SEQ ID NO: 896 - DNA, 19 bp, Homo sapiens
actttcggtcaagggaatt

SEQ ID NO: 897 - DNA, 19 bp, Homo sapiens
attcccttgaccgaaagtt

SEQ ID NO: 898 - DNA, 19 bp, Homo sapiens
aactttcggtcaagggaat

SEQ ID NO: 899 - DNA, 19 bp, Homo sapiens
ttcccttgaccgaaagtta

SEQ ID NO: 900 - DNA, 19 bp, Homo sapiens
taactttcggtcaagggaa

SEQ ID NO: 901 - DNA, 19 bp, Homo sapiens
tcccttgaccgaaagttac

SEQ ID NO: 902 - DNA, 19 bp, Homo sapiens
gtaactttcggtcaaggga

SEQ ID NO: 903 - DNA, 19 bp, Homo sapiens
cccttgaccgaaagttact

SEQ ID NO: 904 - DNA, 19 bp, Homo sapiens
agtaactttcggtcaaggg

SEQ ID NO: 905 - DNA, 19 bp, Homo sapiens
ccttgaccgaaagttactg

SEQ ID NO: 906 - DNA, 19 bp, Homo sapiens
cagtaactttcggtcaagg

SEQ ID NO: 907 - DNA, 19 bp, Homo sapiens
cttgaccgaaagttactgt

SEQ ID NO: 908 - DNA, 19 bp, Homo sapiens
acagtaactttcggtcaag

SEQ ID NO: 909 - DNA, 19 bp, Homo sapiens
ttgaccgaaagttactgtg

SEQ ID NO: 910 - DNA, 19 bp, Homo sapiens
cacagtaactttcggtcaa

SEQ ID NO: 911 - DNA, 19 bp, Homo sapiens
tgaccgaaagttactgtgg

SEQ ID NO: 912 - DNA, 19 bp, Homo sapiens
ccacagtaactttcggtca

SEQ ID NO: 913 - DNA, 19 bp, Homo sapiens
gaccgaaagttactgtggc

SEQ ID NO: 914 - DNA, 19 bp, Homo sapiens
gccacagtaactttcggtc

SEQ ID NO: 915 - DNA, 19 bp, Homo sapiens
accgaaagttactgtggcc

SEQ ID NO: 916 - DNA, 19 bp, Homo sapiens
ggccacagtaactttcggt

SEQ ID NO: 917 - DNA, 19 bp, Homo sapiens
ccgaaagttactgtggccc

SEQ ID NO: 918 - DNA, 19 bp, Homo sapiens
gggccacagtaactttcgg

SEQ ID NO: 919 - DNA, 19 bp, Homo sapiens
cgaaagttactgtggccca

SEQ ID NO: 920 - DNA, 19 bp, Homo sapiens
tgggccacagtaactttcg

SEQ ID NO: 921 - DNA, 19 bp, Homo sapiens
gaaagttactgtggcccat

SEQ ID NO: 922 - DNA, 19 bp, Homo sapiens
atgggccacagtaactttc

SEQ ID NO: 923 - DNA, 19 bp, Homo sapiens
aaagttactgtggcccatg

SEQ ID NO: 924 - DNA, 19 bp, Homo sapiens
catgggccacagtaacttt

SEQ ID NO: 925 - DNA, 19 bp, Homo sapiens
aagttactgtggcccatgt

SEQ ID NO: 926 - DNA, 19 bp, Homo sapiens
acatgggccacagtaactt

SEQ ID NO: 927 - DNA, 19 bp, Homo sapiens
agttactgtggcccatgtc

SEQ ID NO: 928 - DNA, 19 bp, Homo sapiens
gacatgggccacagtaact

SEQ ID NO: 929 - DNA, 19 bp, Homo sapiens
gttactgtggcccatgtcc

SEQ ID NO: 930 - DNA, 19 bp, Homo sapiens
ggacatgggccacagtaac

SEQ ID NO: 931 - DNA, 19 bp, Homo sapiens
ttactgtggcccatgtcct

SEQ ID NO: 932 - DNA, 19 bp, Homo sapiens
aggacatgggccacagtaa

SEQ ID NO: 933 - DNA, 19 bp, Homo sapiens
tactgtggcccatgtccta

SEQ ID NO: 934 - DNA, 19 bp, Homo sapiens
taggacatgggccacagta

SEQ ID NO: 935 - DNA, 19 bp, Homo sapiens
actgtggcccatgtcctaa

SEQ ID NO: 936 - DNA, 19 bp, Homo sapiens
ttaggacatgggccacagt

SEQ ID NO: 937 - DNA, 19 bp, Homo sapiens
ctgtggcccatgtcctaaa

SEQ ID NO: 938 - DNA, 19 bp, Homo sapiens
tttaggacatgggccacag

SEQ ID NO: 939 - DNA, 19 bp, Homo sapiens
tgtggcccatgtcctaaaa

SEQ ID NO: 940 - DNA, 19 bp, Homo sapiens
ttttaggacatgggccaca

SEQ ID NO: 941 - DNA, 19 bp, Homo sapiens
gtggcccatgtcctaaaaa

SEQ ID NO: 942 - DNA, 19 bp, Homo sapiens
tttttaggacatgggccac

SEQ ID NO: 943 - DNA, 19 bp, Homo sapiens
tggcccatgtcctaaaaac

SEQ ID NO: 944 - DNA, 19 bp, Homo sapiens
gtttttaggacatgggcca

SEQ ID NO: 945 - DNA, 19 bp, Homo sapiens
ggcccatgtcctaaaaact

SEQ ID NO: 946 - DNA, 19 bp, Homo sapiens
agtttttaggacatgggcc

SEQ ID NO: 947 - DNA, 19 bp, Homo sapiens
gcccatgtcctaaaaactg

SEQ ID NO: 948 - DNA, 19 bp, Homo sapiens
cagtttttaggacatgggc

SEQ ID NO: 949 - DNA, 19 bp, Homo sapiens
cccatgtcctaaaaactgg

SEQ ID NO: 950 - DNA, 19 bp, Homo sapiens
ccagtttttaggacatggg

SEQ ID NO: 951 - DNA, 19 bp, Homo sapiens
ccatgtcctaaaaactgga

SEQ ID NO: 952 - DNA, 19 bp, Homo sapiens
tccagtttttaggacatgg

SEQ ID NO: 953 - DNA, 19 bp, Homo sapiens
catgtcctaaaaactggat

SEQ ID NO: 954 - DNA, 19 bp, Homo sapiens
atccagtttttaggacatg

SEQ ID NO: 955 - DNA, 19 bp, Homo sapiens
atgtcctaaaaactggata

SEQ ID NO: 956 - DNA, 19 bp, Homo sapiens
tatccagtttttaggacat

SEQ ID NO: 957 - DNA, 19 bp, Homo sapiens
tgtcctaaaaactggatat

SEQ ID NO: 958 - DNA, 19 bp, Homo sapiens
atatccagtttttaggaca

SEQ ID NO: 959 - DNA, 19 bp, Homo sapiens
gtcctaaaaactggatatg

SEQ ID NO: 960 - DNA, 19 bp, Homo sapiens
catatccagtttttaggac

SEQ ID NO: 961 - DNA, 19 bp, Homo sapiens
tcctaaaaactggatatgt

SEQ ID NO: 962 - DNA, 19 bp, Homo sapiens
acatatccagtttttagga

SEQ ID NO: 963 - DNA, 19 bp, Homo sapiens
cctaaaaactggatatgtt

SEQ ID NO: 964 - DNA, 19 bp, Homo sapiens
aacatatccagtttttagg

SEQ ID NO: 965 - DNA, 19 bp, Homo sapiens
ctaaaaactggatatgtta

SEQ ID NO: 966 - DNA, 19 bp, Homo sapiens
taacatatccagtttttag

SEQ ID NO: 967 - DNA, 19 bp, Homo sapiens
taaaaactggatatgttac

SEQ ID NO: 968 - DNA, 19 bp, Homo sapiens
gtaacatatccagttttta

SEQ ID NO: 969 - DNA, 19 bp, Homo sapiens
aaaaactggatatgttaca

SEQ ID NO: 970 - DNA, 19 bp, Homo sapiens
tgtaacatatccagttttt

SEQ ID NO: 971 - DNA, 19 bp, Homo sapiens
aaaactggatatgttacaa

SEQ ID NO: 972 - DNA, 19 bp, Homo sapiens
ttgtaacatatccagtttt

SEQ ID NO: 973 - DNA, 19 bp, Homo sapiens
aaactggatatgttacaaa

SEQ ID NO: 974 - DNA, 19 bp, Homo sapiens
tttgtaacatatccagttt

SEQ ID NO: 975 - DNA, 19 bp, Homo sapiens
aactggatatgttacaaaa

SEQ ID NO: 976 - DNA, 19 bp, Homo sapiens
ttttgtaacatatccagtt

SEQ ID NO: 977 - DNA, 19 bp, Homo sapiens
actggatatgttacaaaaa

SEQ ID NO: 978 - DNA, 19 bp, Homo sapiens
tttttgtaacatatccagt

SEQ ID NO: 979 - DNA, 19 bp, Homo sapiens
ctggatatgttacaaaaat

SEQ ID NO: 980 - DNA, 19 bp, Homo sapiens
atttttgtaacatatccag

SEQ ID NO: 981 - DNA, 19 bp, Homo sapiens
tggatatgttacaaaaata

SEQ ID NO: 982 - DNA, 19 bp, Homo sapiens
tatttttgtaacatatcca

SEQ ID NO: 983 - DNA, 19 bp, Homo sapiens
ggatatgttacaaaaataa

SEQ ID NO: 984 - DNA, 19 bp, Homo sapiens
ttatttttgtaacatatcc

SEQ ID NO: 985 - DNA, 19 bp, Homo sapiens
gatatgttacaaaaataac

SEQ ID NO: 986 - DNA, 19 bp, Homo sapiens
gttatttttgtaacatatc

SEQ ID NO: 987 - DNA, 19 bp, Homo sapiens
atatgttacaaaaataact

SEQ ID NO: 988 - DNA, 19 bp, Homo sapiens
agttatttttgtaacatat

SEQ ID NO: 989 - DNA, 19 bp, Homo sapiens
tatgttacaaaaataactg

SEQ ID NO: 990 - DNA, 19 bp, Homo sapiens
cagttatttttgtaacata

SEQ ID NO: 991 - DNA, 19 bp, Homo sapiens
atgttacaaaaataactgc

SEQ ID NO: 992 - DNA, 19 bp, Homo sapiens
gcagttatttttgtaacat

SEQ ID NO: 993 - DNA, 19 bp, Homo sapiens
tgttacaaaaataactgct

SEQ ID NO: 994 - DNA, 19 bp, Homo sapiens
agcagttatttttgtaaca

SEQ ID NO: 995 - DNA, 19 bp, Homo sapiens
gttacaaaaataactgcta

SEQ ID NO: 996 - DNA, 19 bp, Homo sapiens
tagcagttatttttgtaac

SEQ ID NO: 997 - DNA, 19 bp, Homo sapiens
ttacaaaaataactgctac

SEQ ID NO: 998 - DNA, 19 bp, Homo sapiens
gtagcagttatttttgtaa

SEQ ID NO: 999 - DNA, 19 bp, Homo sapiens
tacaaaaataactgctacc

SEQ ID NO: 1000 - DNA, 19 bp, Homo sapiens
ggtagcagttatttttgta

SEQ ID NO: 1001 - DNA, 19 bp, Homo sapiens
acaaaaataactgctacca

SEQ ID NO: 1002 - DNA, 19 bp, Homo sapiens
tggtagcagttatttttgt

SEQ ID NO: 1003 - DNA, 19 bp, Homo sapiens
caaaaataactgctaccaa

SEQ ID NO: 1004 - DNA, 19 bp, Homo sapiens
ttggtagcagttatttttg

SEQ ID NO: 1005 - DNA, 19 bp, Homo sapiens
aaaaataactgctaccaat

SEQ ID NO: 1006 - DNA, 19 bp, Homo sapiens
attggtagcagttattttt

SEQ ID NO: 1007 - DNA, 19 bp, Homo sapiens
aaaataactgctaccaatt

SEQ ID NO: 1008 - DNA, 19 bp, Homo sapiens
aattggtagcagttatttt

SEQ ID NO: 1009 - DNA, 19 bp, Homo sapiens
aaataactgctaccaattt

SEQ ID NO: 1010 - DNA, 19 bp, Homo sapiens
aaattggtagcagttattt

SEQ ID NO: 1011 - DNA, 19 bp, Homo sapiens
aataactgctaccaatttt

SEQ ID NO: 1012 - DNA, 19 bp, Homo sapiens
aaaattggtagcagttatt

SEQ ID NO: 1013 - DNA, 19 bp, Homo sapiens
ataactgctaccaattttt

SEQ ID NO: 1014 - DNA, 19 bp, Homo sapiens
aaaaattggtagcagttat

SEQ ID NO: 1015 - DNA, 19 bp, Homo sapiens
taactgctaccaatttttt

SEQ ID NO: 1016 - DNA, 19 bp, Homo sapiens
aaaaaattggtagcagtta

SEQ ID NO: 1017 - DNA, 19 bp, Homo sapiens
aactgctaccaattttttg

SEQ ID NO: 1018 - DNA, 19 bp, Homo sapiens
caaaaaattggtagcagtt

SEQ ID NO: 1019 - DNA, 19 bp, Homo sapiens
actgctaccaattttttga

SEQ ID NO: 1020 - DNA, 19 bp, Homo sapiens
tcaaaaaattggtagcagt

SEQ ID NO: 1021 - DNA, 19 bp, Homo sapiens
ctgctaccaattttttgat

SEQ ID NO: 1022 - DNA, 19 bp, Homo sapiens
atcaaaaaattggtagcag

SEQ ID NO: 1023 - DNA, 19 bp, Homo sapiens
tgctaccaattttttgatg

SEQ ID NO: 1024 - DNA, 19 bp, Homo sapiens
catcaaaaaattggtagca

SEQ ID NO: 1025 - DNA, 19 bp, Homo sapiens
gctaccaattttttgatga

SEQ ID NO: 1026 - DNA, 19 bp, Homo sapiens
tcatcaaaaaattggtagc

SEQ ID NO: 1027 - DNA, 19 bp, Homo sapiens
ctaccaattttttgatgag

SEQ ID NO: 1028 - DNA, 19 bp, Homo sapiens
ctcatcaaaaaattggtag

SEQ ID NO: 1029 - DNA, 19 bp, Homo sapiens
taccaattttttgatgaga

SEQ ID NO: 1030 - DNA, 19 bp, Homo sapiens
tctcatcaaaaaattggta

SEQ ID NO: 1031 - DNA, 19 bp, Homo sapiens
accaattttttgatgagag

SEQ ID NO: 1032 - DNA, 19 bp, Homo sapiens
ctctcatcaaaaaattggt

SEQ ID NO: 1033 - DNA, 19 bp, Homo sapiens
ccaattttttgatgagagt

SEQ ID NO: 1034 - DNA, 19 bp, Homo sapiens
actctcatcaaaaaattgg

SEQ ID NO: 1035 - DNA, 19 bp, Homo sapiens
caattttttgatgagagta

SEQ ID NO: 1036 - DNA, 19 bp, Homo sapiens
tactctcatcaaaaaattg

SEQ ID NO: 1037 - DNA, 19 bp, Homo sapiens
aattttttgatgagagtaa

SEQ ID NO: 1038 - DNA, 19 bp, Homo sapiens
ttactctcatcaaaaaatt

SEQ ID NO: 1039 - DNA, 19 bp, Homo sapiens
attttttgatgagagtaaa

SEQ ID NO: 1040 - DNA, 19 bp, Homo sapiens
tttactctcatcaaaaaat

SEQ ID NO: 1041 - DNA, 19 bp, Homo sapiens
ttttttgatgagagtaaaa

SEQ ID NO: 1042 - DNA, 19 bp, Homo sapiens
ttttactctcatcaaaaaa

SEQ ID NO: 1043 - DNA, 19 bp, Homo sapiens
tttttgatgagagtaaaaa

SEQ ID NO: 1044 - DNA, 19 bp, Homo sapiens
tttttactctcatcaaaaa

SEQ ID NO: 1045 - DNA, 19 bp, Homo sapiens
ttttgatgagagtaaaaac

SEQ ID NO: 1046 - DNA, 19 bp, Homo sapiens
gtttttactctcatcaaaa

SEQ ID NO: 1047 - DNA, 19 bp, Homo sapiens
tttgatgagagtaaaaact

SEQ ID NO: 1048 - DNA, 19 bp, Homo sapiens
agtttttactctcatcaaa

SEQ ID NO: 1049 - DNA, 19 bp, Homo sapiens
ttgatgagagtaaaaactg

SEQ ID NO: 1050 - DNA, 19 bp, Homo sapiens
cagtttttactctcatcaa

SEQ ID NO: 1051 - DNA, 19 bp, Homo sapiens
tgatgagagtaaaaactgg

SEQ ID NO: 1052 - DNA, 19 bp, Homo sapiens
ccagtttttactctcatca

SEQ ID NO: 1053 - DNA, 19 bp, Homo sapiens
gatgagagtaaaaactggt

SEQ ID NO: 1054 - DNA, 19 bp, Homo sapiens
accagtttttactctcatc

SEQ ID NO: 1055 - DNA, 19 bp, Homo sapiens
atgagagtaaaaactggta

SEQ ID NO: 1056 - DNA, 19 bp, Homo sapiens
taccagtttttactctcat

SEQ ID NO: 1057 - DNA, 19 bp, Homo sapiens
tgagagtaaaaactggtat

SEQ ID NO: 1058 - DNA, 19 bp, Homo sapiens
ataccagtttttactctca

SEQ ID NO: 1059 - DNA, 19 bp, Homo sapiens
gagagtaaaaactggtatg

SEQ ID NO: 1060 - DNA, 19 bp, Homo sapiens
cataccagtttttactctc

SEQ ID NO: 1061 - DNA, 19 bp, Homo sapiens
agagtaaaaactggtatga

SEQ ID NO: 1062 - DNA, 19 bp, Homo sapiens
tcataccagtttttactct

SEQ ID NO: 1063 - DNA, 19 bp, Homo sapiens
gagtaaaaactggtatgag

SEQ ID NO: 1064 - DNA, 19 bp, Homo sapiens
ctcataccagtttttactc

SEQ ID NO: 1065 - DNA, 19 bp, Homo sapiens
agtaaaaactggtatgaga

SEQ ID NO: 1066 - DNA, 19 bp, Homo sapiens
tctcataccagtttttact

SEQ ID NO: 1067 - DNA, 19 bp, Homo sapiens
gtaaaaactggtatgagag

SEQ ID NO: 1068 - DNA, 19 bp, Homo sapiens
ctctcataccagtttttac

SEQ ID NO: 1069 - DNA, 19 bp, Homo sapiens
taaaaactggtatgagagc

SEQ ID NO: 1070 - DNA, 19 bp, Homo sapiens
gctctcataccagttttta

SEQ ID NO: 1071 - DNA, 19 bp, Homo sapiens
aaaaactggtatgagagcc

SEQ ID NO: 1072 - DNA, 19 bp, Homo sapiens
ggctctcataccagttttt

SEQ ID NO: 1073 - DNA, 19 bp, Homo sapiens
aaaactggtatgagagcca

SEQ ID NO: 1074 - DNA, 19 bp, Homo sapiens
tggctctcataccagtttt

SEQ ID NO: 1075 - DNA, 19 bp, Homo sapiens
aaactggtatgagagccag

SEQ ID NO: 1076 - DNA, 19 bp, Homo sapiens
ctggctctcataccagttt

SEQ ID NO: 1077 - DNA, 19 bp, Homo sapiens
aactggtatgagagccagg

SEQ ID NO: 1078 - DNA, 19 bp, Homo sapiens
cctggctctcataccagtt

SEQ ID NO: 1079 - DNA, 19 bp, Homo sapiens
actggtatgagagccaggc

SEQ ID NO: 1080 - DNA, 19 bp, Homo sapiens
gcctggctctcataccagt

SEQ ID NO: 1081 - DNA, 19 bp, Homo sapiens
ctggtatgagagccaggct

SEQ ID NO: 1082 - DNA, 19 bp, Homo sapiens
agcctggctctcataccag

SEQ ID NO: 1083 - DNA, 19 bp, Homo sapiens
tggtatgagagccaggctt

SEQ ID NO: 1084 - DNA, 19 bp, Homo sapiens
aagcctggctctcatacca

SEQ ID NO: 1085 - DNA, 19 bp, Homo sapiens
ggtatgagagccaggcttc

SEQ ID NO: 1086 - DNA, 19 bp, Homo sapiens
gaagcctggctctcatacc

SEQ ID NO: 1087 - DNA, 19 bp, Homo sapiens
gtatgagagccaggcttct

SEQ ID NO: 1088 - DNA, 19 bp, Homo sapiens
agaagcctggctctcatac

SEQ ID NO: 1089 - DNA, 19 bp, Homo sapiens
tatgagagccaggcttctt

SEQ ID NO: 1090 - DNA, 19 bp, Homo sapiens
aagaagcctggctctcata

SEQ ID NO: 1091 - DNA, 19 bp, Homo sapiens
atgagagccaggcttcttg

SEQ ID NO: 1092 - DNA, 19 bp, Homo sapiens
caagaagcctggctctcat

SEQ ID NO: 1093 - DNA, 19 bp, Homo sapiens
tgagagccaggcttcttgt

SEQ ID NO: 1094 - DNA, 19 bp, Homo sapiens
acaagaagcctggctctca

SEQ ID NO: 1095 - DNA, 19 bp, Homo sapiens
gagagccaggcttcttgta

SEQ ID NO: 1096 - DNA, 19 bp, Homo sapiens
tacaagaagcctggctctc

SEQ ID NO: 1097 - DNA, 19 bp, Homo sapiens
agagccaggcttcttgtat

SEQ ID NO: 1098 - DNA, 19 bp, Homo sapiens
atacaagaagcctggctct

SEQ ID NO: 1099 - DNA, 19 bp, Homo sapiens
gagccaggcttcttgtatg

SEQ ID NO: 1100 - DNA, 19 bp, Homo sapiens
catacaagaagcctggctc

SEQ ID NO: 1101 - DNA, 19 bp, Homo sapiens
agccaggcttcttgtatgt

SEQ ID NO: 1102 - DNA, 19 bp, Homo sapiens
acatacaagaagcctggct

SEQ ID NO: 1103 - DNA, 19 bp, Homo sapiens
gccaggcttcttgtatgtc

SEQ ID NO: 1104 - DNA, 19 bp, Homo sapiens
gacatacaagaagcctggc

SEQ ID NO: 1105 - DNA, 19 bp, Homo sapiens
ccaggcttcttgtatgtct

SEQ ID NO: 1106 - DNA, 19 bp, Homo sapiens
agacatacaagaagcctgg

SEQ ID NO: 1107 - DNA, 19 bp, Homo sapiens
caggcttcttgtatgtctc

SEQ ID NO: 1108 - DNA, 19 bp, Homo sapiens
gagacatacaagaagcctg

SEQ ID NO: 1109 - DNA, 19 bp, Homo sapiens
aggcttcttgtatgtctca

SEQ ID NO: 1110 - DNA, 19 bp, Homo sapiens
tgagacatacaagaagcct

SEQ ID NO: 1111 - DNA, 19 bp, Homo sapiens
ggcttcttgtatgtctcaa

SEQ ID NO: 1112 - DNA, 19 bp, Homo sapiens
ttgagacatacaagaagcc

SEQ ID NO: 1113 - DNA, 19 bp, Homo sapiens
gcttcttgtatgtctcaaa

SEQ ID NO: 1114 - DNA, 19 bp, Homo sapiens
tttgagacatacaagaagc

SEQ ID NO: 1115 - DNA, 19 bp, Homo sapiens
cttcttgtatgtctcaaaa

SEQ ID NO: 1116 - DNA, 19 bp, Homo sapiens
ttttgagacatacaagaag

SEQ ID NO: 1117 - DNA, 19 bp, Homo sapiens
ttcttgtatgtctcaaaat

SEQ ID NO: 1118 - DNA, 19 bp, Homo sapiens
attttgagacatacaagaa

SEQ ID NO: 1119 - DNA, 19 bp, Homo sapiens
tcttgtatgtctcaaaatg

SEQ ID NO: 1120 - DNA, 19 bp, Homo sapiens
cattttgagacatacaaga

SEQ ID NO: 1121 - DNA, 19 bp, Homo sapiens
cttgtatgtctcaaaatgc

SEQ ID NO: 1122 - DNA, 19 bp, Homo sapiens
gcattttgagacatacaag

SEQ ID NO: 1123 - DNA, 19 bp, Homo sapiens
ttgtatgtctcaaaatgcc

SEQ ID NO: 1124 - DNA, 19 bp, Homo sapiens
ggcattttgagacatacaa

SEQ ID NO: 1125 - DNA, 19 bp, Homo sapiens
tgtatgtctcaaaatgcca

SEQ ID NO: 1126 - DNA, 19 bp, Homo sapiens
tggcattttgagacataca

SEQ ID NO: 1127 - DNA, 19 bp, Homo sapiens
gtatgtctcaaaatgccag

SEQ ID NO: 1128 - DNA, 19 bp, Homo sapiens
ctggcattttgagacatac

SEQ ID NO: 1129 - DNA, 19 bp, Homo sapiens
tatgtctcaaaatgccagc

SEQ ID NO: 1130 - DNA, 19 bp, Homo sapiens
gctggcattttgagacata

SEQ ID NO: 1131 - DNA, 19 bp, Homo sapiens
atgtctcaaaatgccagcc

SEQ ID NO: 1132 - DNA, 19 bp, Homo sapiens
ggctggcattttgagacat

SEQ ID NO: 1133 - DNA, 19 bp, Homo sapiens
tgtctcaaaatgccagcct

SEQ ID NO: 1134 - DNA, 19 bp, Homo sapiens
aggctggcattttgagaca

SEQ ID NO: 1135 - DNA, 19 bp, Homo sapiens
gtctcaaaatgccagcctt

SEQ ID NO: 1136 - DNA, 19 bp, Homo sapiens
aaggctggcattttgagac

SEQ ID NO: 1137 - DNA, 19 bp, Homo sapiens
tctcaaaatgccagccttc

SEQ ID NO: 1138 - DNA, 19 bp, Homo sapiens
gaaggctggcattttgaga

SEQ ID NO: 1139 - DNA, 19 bp, Homo sapiens
ctcaaaatgccagccttct

SEQ ID NO: 1140 - DNA, 19 bp, Homo sapiens
agaaggctggcattttgag

SEQ ID NO: 1141 - DNA, 19 bp, Homo sapiens
tcaaaatgccagccttctg

SEQ ID NO: 1142 - DNA, 19 bp, Homo sapiens
cagaaggctggcattttga

SEQ ID NO: 1143 - DNA, 19 bp, Homo sapiens
caaaatgccagccttctga

SEQ ID NO: 1144 - DNA, 19 bp, Homo sapiens
tcagaaggctggcattttg

SEQ ID NO: 1145 - DNA, 19 bp, Homo sapiens
aaaatgccagccttctgaa

SEQ ID NO: 1146 - DNA, 19 bp, Homo sapiens
ttcagaaggctggcatttt

SEQ ID NO: 1147 - DNA, 19 bp, Homo sapiens
aaatgccagccttctgaaa

SEQ ID NO: 1148 - DNA, 19 bp, Homo sapiens
tttcagaaggctggcattt

SEQ ID NO: 1149 - DNA, 19 bp, Homo sapiens
aatgccagccttctgaaag

SEQ ID NO: 1150 - DNA, 19 bp, Homo sapiens
ctttcagaaggctggcatt

SEQ ID NO: 1151 - DNA, 19 bp, Homo sapiens
atgccagccttctgaaagt

SEQ ID NO: 1152 - DNA, 19 bp, Homo sapiens
actttcagaaggctggcat

SEQ ID NO: 1153 - DNA, 19 bp, Homo sapiens
tgccagccttctgaaagta

SEQ ID NO: 1154 - DNA, 19 bp, Homo sapiens
tactttcagaaggctggca

SEQ ID NO: 1155 - DNA, 19 bp, Homo sapiens
gccagccttctgaaagtat

SEQ ID NO: 1156 - DNA, 19 bp, Homo sapiens
atactttcagaaggctggc

SEQ ID NO: 1157 - DNA, 19 bp, Homo sapiens
ccagccttctgaaagtata

SEQ ID NO: 1158 - DNA, 19 bp, Homo sapiens
tatactttcagaaggctgg

SEQ ID NO: 1159 - DNA, 19 bp, Homo sapiens
cagccttctgaaagtatac

SEQ ID NO: 1160 - DNA, 19 bp, Homo sapiens
gtatactttcagaaggctg

SEQ ID NO: 1161 - DNA, 19 bp, Homo sapiens
agccttctgaaagtataca

SEQ ID NO: 1162 - DNA, 19 bp, Homo sapiens
tgtatactttcagaaggct

SEQ ID NO: 1163 - DNA, 19 bp, Homo sapiens
gccttctgaaagtatacag

SEQ ID NO: 1164 - DNA, 19 bp, Homo sapiens
ctgtatactttcagaaggc

SEQ ID NO: 1165 - DNA, 19 bp, Homo sapiens
ccttctgaaagtatacagc

SEQ ID NO: 1166 - DNA, 19 bp, Homo sapiens
gctgtatactttcagaagg

SEQ ID NO: 1167 - DNA, 19 bp, Homo sapiens
cttctgaaagtatacagca

SEQ ID NO: 1168 - DNA, 19 bp, Homo sapiens
tgctgtatactttcagaag

SEQ ID NO: 1169 - DNA, 19 bp, Homo sapiens
ttctgaaagtatacagcaa

SEQ ID NO: 1170 - DNA, 19 bp, Homo sapiens
ttgctgtatactttcagaa

SEQ ID NO: 1171 - DNA, 19 bp, Homo sapiens
tctgaaagtatacagcaaa

SEQ ID NO: 1172 - DNA, 19 bp, Homo sapiens
tttgctgtatactttcaga

SEQ ID NO: 1173 - DNA, 19 bp, Homo sapiens
ctgaaagtatacagcaaag

SEQ ID NO: 1174 - DNA, 19 bp, Homo sapiens
ctttgctgtatactttcag

SEQ ID NO: 1175 - DNA, 19 bp, Homo sapiens
tgaaagtatacagcaaaga

SEQ ID NO: 1176 - DNA, 19 bp, Homo sapiens
tctttgctgtatactttca

SEQ ID NO: 1177 - DNA, 19 bp, Homo sapiens
gaaagtatacagcaaagag

SEQ ID NO: 1178 - DNA, 19 bp, Homo sapiens
ctctttgctgtatactttc

SEQ ID NO: 1179 - DNA, 19 bp, Homo sapiens
aaagtatacagcaaagagg

SEQ ID NO: 1180 - DNA, 19 bp, Homo sapiens
cctctttgctgtatacttt

SEQ ID NO: 1181 - DNA, 19 bp, Homo sapiens
aagtatacagcaaagagga

SEQ ID NO: 1182 - DNA, 19 bp, Homo sapiens
tcctctttgctgtatactt

SEQ ID NO: 1183 - DNA, 19 bp, Homo sapiens
agtatacagcaaagaggac

SEQ ID NO: 1184 - DNA, 19 bp, Homo sapiens
gtcctctttgctgtatact

SEQ ID NO: 1185 - DNA, 19 bp, Homo sapiens
gtatacagcaaagaggacc

SEQ ID NO: 1186 - DNA, 19 bp, Homo sapiens
ggtcctctttgctgtatac

SEQ ID NO: 1187 - DNA, 19 bp, Homo sapiens
tatacagcaaagaggacca

SEQ ID NO: 1188 - DNA, 19 bp, Homo sapiens
tggtcctctttgctgtata

SEQ ID NO: 1189 - DNA, 19 bp, Homo sapiens
atacagcaaagaggaccag

SEQ ID NO: 1190 - DNA, 19 bp, Homo sapiens
ctggtcctctttgctgtat

SEQ ID NO: 1191 - DNA, 19 bp, Homo sapiens
tacagcaaagaggaccagg

SEQ ID NO: 1192 - DNA, 19 bp, Homo sapiens
cctggtcctctttgctgta

SEQ ID NO: 1193 - DNA, 19 bp, Homo sapiens
acagcaaagaggaccagga

SEQ ID NO: 1194 - DNA, 19 bp, Homo sapiens
tcctggtcctctttgctgt

SEQ ID NO: 1195 - DNA, 19 bp, Homo sapiens
cagcaaagaggaccaggat

SEQ ID NO: 1196 - DNA, 19 bp, Homo sapiens
atcctggtcctctttgctg

SEQ ID NO: 1197 - DNA, 19 bp, Homo sapiens
agcaaagaggaccaggatt

SEQ ID NO: 1198 - DNA, 19 bp, Homo sapiens
aatcctggtcctctttgct

SEQ ID NO: 1199 - DNA, 19 bp, Homo sapiens
gcaaagaggaccaggattt

SEQ ID NO: 1200 - DNA, 19 bp, Homo sapiens
aaatcctggtcctctttgc

SEQ ID NO: 1201 - DNA, 19 bp, Homo sapiens
caaagaggaccaggattta

SEQ ID NO: 1202 - DNA, 19 bp, Homo sapiens
taaatcctggtcctctttg

SEQ ID NO: 1203 - DNA, 19 bp, Homo sapiens
aaagaggaccaggatttac

SEQ ID NO: 1204 - DNA, 19 bp, Homo sapiens
gtaaatcctggtcctcttt

SEQ ID NO: 1205 - DNA, 19 bp, Homo sapiens
aagaggaccaggatttact

SEQ ID NO: 1206 - DNA, 19 bp, Homo sapiens
agtaaatcctggtcctctt

SEQ ID NO: 1207 - DNA, 19 bp, Homo sapiens
agaggaccaggatttactt

SEQ ID NO: 1208 - DNA, 19 bp, Homo sapiens
aagtaaatcctggtcctct

SEQ ID NO: 1209 - DNA, 19 bp, Homo sapiens
gaggaccaggatttactta

SEQ ID NO: 1210 - DNA, 19 bp, Homo sapiens
taagtaaatcctggtcctc

SEQ ID NO: 1211 - DNA, 19 bp, Homo sapiens
aggaccaggatttacttaa

SEQ ID NO: 1212 - DNA, 19 bp, Homo sapiens
ttaagtaaatcctggtcct

SEQ ID NO: 1213 - DNA, 19 bp, Homo sapiens
ggaccaggatttacttaaa

SEQ ID NO: 1214 - DNA, 19 bp, Homo sapiens
tttaagtaaatcctggtcc

SEQ ID NO: 1215 - DNA, 19 bp, Homo sapiens
gaccaggatttacttaaac

SEQ ID NO: 1216 - DNA, 19 bp, Homo sapiens
gtttaagtaaatcctggtc

SEQ ID NO: 1217 - DNA, 19 bp, Homo sapiens
accaggatttacttaaact

SEQ ID NO: 1218 - DNA, 19 bp, Homo sapiens
agtttaagtaaatcctggt

SEQ ID NO: 1219 - DNA, 19 bp, Homo sapiens
ccaggatttacttaaactg

SEQ ID NO: 1220 - DNA, 19 bp, Homo sapiens
cagtttaagtaaatcctgg

SEQ ID NO: 1221 - DNA, 19 bp, Homo sapiens
caggatttacttaaactgg

SEQ ID NO: 1222 - DNA, 19 bp, Homo sapiens
ccagtttaagtaaatcctg

SEQ ID NO: 1223 - DNA, 19 bp, Homo sapiens
aggatttacttaaactggt

SEQ ID NO: 1224 - DNA, 19 bp, Homo sapiens
accagtttaagtaaatcct

SEQ ID NO: 1225 - DNA, 19 bp, Homo sapiens
ggatttacttaaactggtg

SEQ ID NO: 1226 - DNA, 19 bp, Homo sapiens
caccagtttaagtaaatcc

SEQ ID NO: 1227 - DNA, 19 bp, Homo sapiens
gatttacttaaactggtga

SEQ ID NO: 1228 - DNA, 19 bp, Homo sapiens
tcaccagtttaagtaaatc

SEQ ID NO: 1229 - DNA, 19 bp, Homo sapiens
atttacttaaactggtgaa

SEQ ID NO: 1230 - DNA, 19 bp, Homo sapiens
ttcaccagtttaagtaaat

SEQ ID NO: 1231 - DNA, 19 bp, Homo sapiens
tttacttaaactggtgaag

SEQ ID NO: 1232 - DNA, 19 bp, Homo sapiens
cttcaccagtttaagtaaa

SEQ ID NO: 1233 - DNA, 19 bp, Homo sapiens
ttacttaaactggtgaagt

SEQ ID NO: 1234 - DNA, 19 bp, Homo sapiens
acttcaccagtttaagtaa

SEQ ID NO: 1235 - DNA, 19 bp, Homo sapiens
tacttaaactggtgaagtc

SEQ ID NO: 1236 - DNA, 19 bp, Homo sapiens
gacttcaccagtttaagta

SEQ ID NO: 1237 - DNA, 19 bp, Homo sapiens
acttaaactggtgaagtca

SEQ ID NO: 1238 - DNA, 19 bp, Homo sapiens
tgacttcaccagtttaagt

SEQ ID NO: 1239 - DNA, 19 bp, Homo sapiens
cttaaactggtgaagtcat

SEQ ID NO: 1240 - DNA, 19 bp, Homo sapiens
atgacttcaccagtttaag

SEQ ID NO: 1241 - DNA, 19 bp, Homo sapiens
ttaaactggtgaagtcata

SEQ ID NO: 1242 - DNA, 19 bp, Homo sapiens
tatgacttcaccagtttaa

SEQ ID NO: 1243 - DNA, 19 bp, Homo sapiens
taaactggtgaagtcatat

SEQ ID NO: 1244 - DNA, 19 bp, Homo sapiens
atatgacttcaccagttta

SEQ ID NO: 1245 - DNA, 19 bp, Homo sapiens
aaactggtgaagtcatatc

SEQ ID NO: 1246 - DNA, 19 bp, Homo sapiens
gatatgacttcaccagttt

SEQ ID NO: 1247 - DNA, 19 bp, Homo sapiens
aactggtgaagtcatatca

SEQ ID NO: 1248 - DNA, 19 bp, Homo sapiens
tgatatgacttcaccagtt

SEQ ID NO: 1249 - DNA, 19 bp, Homo sapiens
actggtgaagtcatatcat

SEQ ID NO: 1250 - DNA, 19 bp, Homo sapiens
atgatatgacttcaccagt

SEQ ID NO: 1251 - DNA, 19 bp, Homo sapiens
ctggtgaagtcatatcatt

SEQ ID NO: 1252 - DNA, 19 bp, Homo sapiens
aatgatatgacttcaccag

SEQ ID NO: 1253 - DNA, 19 bp, Homo sapiens
tggtgaagtcatatcattg

SEQ ID NO: 1254 - DNA, 19 bp, Homo sapiens
caatgatatgacttcacca

SEQ ID NO: 1255 - DNA, 19 bp, Homo sapiens
ggtgaagtcatatcattgg

SEQ ID NO: 1256 - DNA, 19 bp, Homo sapiens
ccaatgatatgacttcacc

SEQ ID NO: 1257 - DNA, 19 bp, Homo sapiens
gtgaagtcatatcattgga

SEQ ID NO: 1258 - DNA, 19 bp, Homo sapiens
tccaatgatatgacttcac

SEQ ID NO: 1259 - DNA, 19 bp, Homo sapiens
tgaagtcatatcattggat

SEQ ID NO: 1260 - DNA, 19 bp, Homo sapiens
atccaatgatatgacttca

SEQ ID NO: 1261 - DNA, 19 bp, Homo sapiens
gaagtcatatcattggatg

SEQ ID NO: 1262 - DNA, 19 bp, Homo sapiens
catccaatgatatgacttc

SEQ ID NO: 1263 - DNA, 19 bp, Homo sapiens
aagtcatatcattggatgg

SEQ ID NO: 1264 - DNA, 19 bp, Homo sapiens
ccatccaatgatatgactt

SEQ ID NO: 1265 - DNA, 19 bp, Homo sapiens
agtcatatcattggatggg

SEQ ID NO: 1266 - DNA, 19 bp, Homo sapiens
cccatccaatgatatgact

SEQ ID NO: 1267 - DNA, 19 bp, Homo sapiens
gtcatatcattggatggga

SEQ ID NO: 1268 - DNA, 19 bp, Homo sapiens
tcccatccaatgatatgac

SEQ ID NO: 1269 - DNA, 19 bp, Homo sapiens
tcatatcattggatgggac

SEQ ID NO: 1270 - DNA, 19 bp, Homo sapiens
gtcccatccaatgatatga

SEQ ID NO: 1271 - DNA, 19 bp, Homo sapiens
catatcattggatgggact

SEQ ID NO: 1272 - DNA, 19 bp, Homo sapiens
agtcccatccaatgatatg

SEQ ID NO: 1273 - DNA, 19 bp, Homo sapiens
atatcattggatgggacta

SEQ ID NO: 1274 - DNA, 19 bp, Homo sapiens
tagtcccatccaatgatat

SEQ ID NO: 1275 - DNA, 19 bp, Homo sapiens
tatcattggatgggactag

SEQ ID NO: 1276 - DNA, 19 bp, Homo sapiens
ctagtcccatccaatgata

SEQ ID NO: 1277 - DNA, 19 bp, Homo sapiens
atcattggatgggactagt

SEQ ID NO: 1278 - DNA, 19 bp, Homo sapiens
actagtcccatccaatgat

SEQ ID NO: 1279 - DNA, 19 bp, Homo sapiens
tcattggatgggactagta

SEQ ID NO: 1280 - DNA, 19 bp, Homo sapiens
tactagtcccatccaatga

SEQ ID NO: 1281 - DNA, 19 bp, Homo sapiens
cattggatgggactagtac

SEQ ID NO: 1282 - DNA, 19 bp, Homo sapiens
gtactagtcccatccaatg

SEQ ID NO: 1283 - DNA, 19 bp, Homo sapiens
attggatgggactagtaca

SEQ ID NO: 1284 - DNA, 19 bp, Homo sapiens
tgtactagtcccatccaat

SEQ ID NO: 1285 - DNA, 19 bp, Homo sapiens
ttggatgggactagtacac

SEQ ID NO: 1286 - DNA, 19 bp, Homo sapiens
gtgtactagtcccatccaa

SEQ ID NO: 1287 - DNA, 19 bp, Homo sapiens
tggatgggactagtacaca

SEQ ID NO: 1288 - DNA, 19 bp, Homo sapiens
tgtgtactagtcccatcca

SEQ ID NO: 1289 - DNA, 19 bp, Homo sapiens
ggatgggactagtacacat

SEQ ID NO: 1290 - DNA, 19 bp, Homo sapiens
atgtgtactagtcccatcc

SEQ ID NO: 1291 - DNA, 19 bp, Homo sapiens
gatgggactagtacacatt

SEQ ID NO: 1292 - DNA, 19 bp, Homo sapiens
aatgtgtactagtcccatc

SEQ ID NO: 1293 - DNA, 19 bp, Homo sapiens
atgggactagtacacattc

SEQ ID NO: 1294 - DNA, 19 bp, Homo sapiens
gaatgtgtactagtcccat

SEQ ID NO: 1295 - DNA, 19 bp, Homo sapiens
tgggactagtacacattcc

SEQ ID NO: 1296 - DNA, 19 bp, Homo sapiens
ggaatgtgtactagtccca

SEQ ID NO: 1297 - DNA, 19 bp, Homo sapiens
gggactagtacacattcca

SEQ ID NO: 1298 - DNA, 19 bp, Homo sapiens
tggaatgtgtactagtccc

SEQ ID NO: 1299 - DNA, 19 bp, Homo sapiens
ggactagtacacattccaa

SEQ ID NO: 1300 - DNA, 19 bp, Homo sapiens
ttggaatgtgtactagtcc

SEQ ID NO: 1301 - DNA, 19 bp, Homo sapiens
gactagtacacattccaac

SEQ ID NO: 1302 - DNA, 19 bp, Homo sapiens
gttggaatgtgtactagtc

SEQ ID NO: 1303 - DNA, 19 bp, Homo sapiens
actagtacacattccaaca

SEQ ID NO: 1304 - DNA, 19 bp, Homo sapiens
tgttggaatgtgtactagt

SEQ ID NO: 1305 - DNA, 19 bp, Homo sapiens
ctagtacacattccaacaa

SEQ ID NO: 1306 - DNA, 19 bp, Homo sapiens
ttgttggaatgtgtactag

SEQ ID NO: 1307 - DNA, 19 bp, Homo sapiens
tagtacacattccaacaaa

SEQ ID NO: 1308 - DNA, 19 bp, Homo sapiens
tttgttggaatgtgtacta

SEQ ID NO: 1309 - DNA, 19 bp, Homo sapiens
agtacacattccaacaaat

SEQ ID NO: 1310 - DNA, 19 bp, Homo sapiens
atttgttggaatgtgtact

SEQ ID NO: 1311 - DNA, 19 bp, Homo sapiens
gtacacattccaacaaatg

SEQ ID NO: 1312 - DNA, 19 bp, Homo sapiens
catttgttggaatgtgtac

SEQ ID NO: 1313 - DNA, 19 bp, Homo sapiens
tacacattccaacaaatgg

SEQ ID NO: 1314 - DNA, 19 bp, Homo sapiens
ccatttgttggaatgtgta

SEQ ID NO: 1315 - DNA, 19 bp, Homo sapiens
acacattccaacaaatgga

SEQ ID NO: 1316 - DNA, 19 bp, Homo sapiens
tccatttgttggaatgtgt

SEQ ID NO: 1317 - DNA, 19 bp, Homo sapiens
cacattccaacaaatggat

SEQ ID NO: 1318 - DNA, 19 bp, Homo sapiens
atccatttgttggaatgtg

SEQ ID NO: 1319 - DNA, 19 bp, Homo sapiens
acattccaacaaatggatc

SEQ ID NO: 1320 - DNA, 19 bp, Homo sapiens
gatccatttgttggaatgt

SEQ ID NO: 1321 - DNA, 19 bp, Homo sapiens
cattccaacaaatggatct

SEQ ID NO: 1322 - DNA, 19 bp, Homo sapiens
agatccatttgttggaatg

SEQ ID NO: 1323 - DNA, 19 bp, Homo sapiens
attccaacaaatggatctt

SEQ ID NO: 1324 - DNA, 19 bp, Homo sapiens
aagatccatttgttggaat

SEQ ID NO: 1325 - DNA, 19 bp, Homo sapiens
ttccaacaaatggatcttg

SEQ ID NO: 1326 - DNA, 19 bp, Homo sapiens
caagatccatttgttggaa

SEQ ID NO: 1327 - DNA, 19 bp, Homo sapiens
tccaacaaatggatcttgg

SEQ ID NO: 1328 - DNA, 19 bp, Homo sapiens
ccaagatccatttgttgga

SEQ ID NO: 1329 - DNA, 19 bp, Homo sapiens
ccaacaaatggatcttggc

SEQ ID NO: 1330 - DNA, 19 bp, Homo sapiens
gccaagatccatttgttgg

SEQ ID NO: 1331 - DNA, 19 bp, Homo sapiens
caacaaatggatcttggca

SEQ ID NO: 1332 - DNA, 19 bp, Homo sapiens
tgccaagatccatttgttg

SEQ ID NO: 1333 - DNA, 19 bp, Homo sapiens
aacaaatggatcttggcag

SEQ ID NO: 1334 - DNA, 19 bp, Homo sapiens
ctgccaagatccatttgtt

SEQ ID NO: 1335 - DNA, 19 bp, Homo sapiens
acaaatggatcttggcagt

SEQ ID NO: 1336 - DNA, 19 bp, Homo sapiens
actgccaagatccatttgt

SEQ ID NO: 1337 - DNA, 19 bp, Homo sapiens
caaatggatcttggcagtg

SEQ ID NO: 1338 - DNA, 19 bp, Homo sapiens
cactgccaagatccatttg

SEQ ID NO: 1339 - DNA, 19 bp, Homo sapiens
aaatggatcttggcagtgg

SEQ ID NO: 1340 - DNA, 19 bp, Homo sapiens
ccactgccaagatccattt

SEQ ID NO: 1341 - DNA, 19 bp, Homo sapiens
aatggatcttggcagtggg

SEQ ID NO: 1342 - DNA, 19 bp, Homo sapiens
cccactgccaagatccatt

SEQ ID NO: 1343 - DNA, 19 bp, Homo sapiens
atggatcttggcagtggga

SEQ ID NO: 1344 - DNA, 19 bp, Homo sapiens
tcccactgccaagatccat

SEQ ID NO: 1345 - DNA, 19 bp, Homo sapiens
tggatcttggcagtgggaa

SEQ ID NO: 1346 - DNA, 19 bp, Homo sapiens
ttcccactgccaagatcca

SEQ ID NO: 1347 - DNA, 19 bp, Homo sapiens
ggatcttggcagtgggaag

SEQ ID NO: 1348 - DNA, 19 bp, Homo sapiens
cttcccactgccaagatcc

SEQ ID NO: 1349 - DNA, 19 bp, Homo sapiens
gatcttggcagtgggaaga

SEQ ID NO: 1350 - DNA, 19 bp, Homo sapiens
tcttcccactgccaagatc

SEQ ID NO: 1351 - DNA, 19 bp, Homo sapiens
atcttggcagtgggaagat

SEQ ID NO: 1352 - DNA, 19 bp, Homo sapiens
atcttcccactgccaagat

SEQ ID NO: 1353 - DNA, 19 bp, Homo sapiens
tcttggcagtgggaagatg

SEQ ID NO: 1354 - DNA, 19 bp, Homo sapiens
catcttcccactgccaaga

SEQ ID NO: 1355 - DNA, 19 bp, Homo sapiens
cttggcagtgggaagatgg

SEQ ID NO: 1356 - DNA, 19 bp, Homo sapiens
ccatcttcccactgccaag

SEQ ID NO: 1357 - DNA, 19 bp, Homo sapiens
ttggcagtgggaagatggc

SEQ ID NO: 1358 - DNA, 19 bp, Homo sapiens
gccatcttcccactgccaa

SEQ ID NO: 1359 - DNA, 19 bp, Homo sapiens
tggcagtgggaagatggct

SEQ ID NO: 1360 - DNA, 19 bp, Homo sapiens
agccatcttcccactgcca

SEQ ID NO: 1361 - DNA, 19 bp, Homo sapiens
ggcagtgggaagatggctc

SEQ ID NO: 1362 - DNA, 19 bp, Homo sapiens
gagccatcttcccactgcc

SEQ ID NO: 1363 - DNA, 19 bp, Homo sapiens
gcagtgggaagatggctcc

SEQ ID NO: 1364 - DNA, 19 bp, Homo sapiens
ggagccatcttcccactgc

SEQ ID NO: 1365 - DNA, 19 bp, Homo sapiens
cagtgggaagatggctcca

SEQ ID NO: 1366 - DNA, 19 bp, Homo sapiens
tggagccatcttcccactg

SEQ ID NO: 1367 - DNA, 19 bp, Homo sapiens
agtgggaagatggctccat

SEQ ID NO: 1368 - DNA, 19 bp, Homo sapiens
atggagccatcttcccact

SEQ ID NO: 1369 - DNA, 19 bp, Homo sapiens
gtgggaagatggctccatt

SEQ ID NO: 1370 - DNA, 19 bp, Homo sapiens
aatggagccatcttcccac

SEQ ID NO: 1371 - DNA, 19 bp, Homo sapiens
tgggaagatggctccattc

SEQ ID NO: 1372 - DNA, 19 bp, Homo sapiens
gaatggagccatcttccca

SEQ ID NO: 1373 - DNA, 19 bp, Homo sapiens
gggaagatggctccattct

SEQ ID NO: 1374 - DNA, 19 bp, Homo sapiens
agaatggagccatcttccc

SEQ ID NO: 1375 - DNA, 19 bp, Homo sapiens
ggaagatggctccattctc

SEQ ID NO: 1376 - DNA, 19 bp, Homo sapiens
gagaatggagccatcttcc

SEQ ID NO: 1377 - DNA, 19 bp, Homo sapiens
gaagatggctccattctct

SEQ ID NO: 1378 - DNA, 19 bp, Homo sapiens
agagaatggagccatcttc

SEQ ID NO: 1379 - DNA, 19 bp, Homo sapiens
aagatggctccattctctc

SEQ ID NO: 1380 - DNA, 19 bp, Homo sapiens
gagagaatggagccatctt

SEQ ID NO: 1381 - DNA, 19 bp, Homo sapiens
agatggctccattctctca

SEQ ID NO: 1382 - DNA, 19 bp, Homo sapiens
tgagagaatggagccatct

SEQ ID NO: 1383 - DNA, 19 bp, Homo sapiens
gatggctccattctctcac

SEQ ID NO: 1384 - DNA, 19 bp, Homo sapiens
gtgagagaatggagccatc

SEQ ID NO: 1385 - DNA, 19 bp, Homo sapiens
atggctccattctctcacc

SEQ ID NO: 1386 - DNA, 19 bp, Homo sapiens
ggtgagagaatggagccat

SEQ ID NO: 1387 - DNA, 19 bp, Homo sapiens
tggctccattctctcaccc

SEQ ID NO: 1388 - DNA, 19 bp, Homo sapiens
gggtgagagaatggagcca

SEQ ID NO: 1389 - DNA, 19 bp, Homo sapiens
ggctccattctctcaccca

SEQ ID NO: 1390 - DNA, 19 bp, Homo sapiens
tgggtgagagaatggagcc

SEQ ID NO: 1391 - DNA, 19 bp, Homo sapiens
gctccattctctcacccaa

SEQ ID NO: 1392 - DNA, 19 bp, Homo sapiens
ttgggtgagagaatggagc

SEQ ID NO: 1393 - DNA, 19 bp, Homo sapiens
ctccattctctcacccaac

SEQ ID NO: 1394 - DNA, 19 bp, Homo sapiens
gttgggtgagagaatggag

SEQ ID NO: 1395 - DNA, 19 bp, Homo sapiens
tccattctctcacccaacc

SEQ ID NO: 1396 - DNA, 19 bp, Homo sapiens
ggttgggtgagagaatgga

SEQ ID NO: 1397 - DNA, 19 bp, Homo sapiens
ccattctctcacccaacct

SEQ ID NO: 1398 - DNA, 19 bp, Homo sapiens
aggttgggtgagagaatgg

SEQ ID NO: 1399 - DNA, 19 bp, Homo sapiens
cattctctcacccaaccta

SEQ ID NO: 1400 - DNA, 19 bp, Homo sapiens
taggttgggtgagagaatg

SEQ ID NO: 1401 - DNA, 19 bp, Homo sapiens
attctctcacccaacctac

SEQ ID NO: 1402 - DNA, 19 bp, Homo sapiens
gtaggttgggtgagagaat

SEQ ID NO: 1403 - DNA, 19 bp, Homo sapiens
ttctctcacccaacctact

SEQ ID NO: 1404 - DNA, 19 bp, Homo sapiens
agtaggttgggtgagagaa

SEQ ID NO: 1405 - DNA, 19 bp, Homo sapiens
tctctcacccaacctacta

SEQ ID NO: 1406 - DNA, 19 bp, Homo sapiens
tagtaggttgggtgagaga

SEQ ID NO: 1407 - DNA, 19 bp, Homo sapiens
ctctcacccaacctactaa

SEQ ID NO: 1408 - DNA, 19 bp, Homo sapiens
ttagtaggttgggtgagag

SEQ ID NO: 1409 - DNA, 19 bp, Homo sapiens
tctcacccaacctactaac

SEQ ID NO: 1410 - DNA, 19 bp, Homo sapiens
gttagtaggttgggtgaga

SEQ ID NO: 1411 - DNA, 19 bp, Homo sapiens
ctcacccaacctactaaca

SEQ ID NO: 1412 - DNA, 19 bp, Homo sapiens
tgttagtaggttgggtgag

SEQ ID NO: 1413 - DNA, 19 bp, Homo sapiens
tcacccaacctactaacaa

SEQ ID NO: 1414 - DNA, 19 bp, Homo sapiens
ttgttagtaggttgggtga

SEQ ID NO: 1415 - DNA, 19 bp, Homo sapiens
cacccaacctactaacaat

SEQ ID NO: 1416 - DNA, 19 bp, Homo sapiens
attgttagtaggttgggtg

SEQ ID NO: 1417 - DNA, 19 bp, Homo sapiens
acccaacctactaacaata

SEQ ID NO: 1418 - DNA, 19 bp, Homo sapiens
tattgttagtaggttgggt

SEQ ID NO: 1419 - DNA, 19 bp, Homo sapiens
cccaacctactaacaataa

SEQ ID NO: 1420 - DNA, 19 bp, Homo sapiens
ttattgttagtaggttggg

SEQ ID NO: 1421 - DNA, 19 bp, Homo sapiens
ccaacctactaacaataat

SEQ ID NO: 1422 - DNA, 19 bp, Homo sapiens
attattgttagtaggttgg

SEQ ID NO: 1423 - DNA, 19 bp, Homo sapiens
caacctactaacaataatt

SEQ ID NO: 1424 - DNA, 19 bp, Homo sapiens
aattattgttagtaggttg

SEQ ID NO: 1425 - DNA, 19 bp, Homo sapiens
aacctactaacaataattg

SEQ ID NO: 1426 - DNA, 19 bp, Homo sapiens
caattattgttagtaggtt

SEQ ID NO: 1427 - DNA, 19 bp, Homo sapiens
acctactaacaataattga

SEQ ID NO: 1428 - DNA, 19 bp, Homo sapiens
tcaattattgttagtaggt

SEQ ID NO: 1429 - DNA, 19 bp, Homo sapiens
cctactaacaataattgaa

SEQ ID NO: 1430 - DNA, 19 bp, Homo sapiens
ttcaattattgttagtagg

SEQ ID NO: 1431 - DNA, 19 bp, Homo sapiens
ctactaacaataattgaaa

SEQ ID NO: 1432 - DNA, 19 bp, Homo sapiens
tttcaattattgttagtag

SEQ ID NO: 1433 - DNA, 19 bp, Homo sapiens
tactaacaataattgaaat

SEQ ID NO: 1434 - DNA, 19 bp, Homo sapiens
atttcaattattgttagta

SEQ ID NO: 1435 - DNA, 19 bp, Homo sapiens
actaacaataattgaaatg

SEQ ID NO: 1436 - DNA, 19 bp, Homo sapiens
catttcaattattgttagt

SEQ ID NO: 1437 - DNA, 19 bp, Homo sapiens
ctaacaataattgaaatgc

SEQ ID NO: 1438 - DNA, 19 bp, Homo sapiens
gcatttcaattattgttag

SEQ ID NO: 1439 - DNA, 19 bp, Homo sapiens
taacaataattgaaatgca

SEQ ID NO: 1440 - DNA, 19 bp, Homo sapiens
tgcatttcaattattgtta

SEQ ID NO: 1441 - DNA, 19 bp, Homo sapiens
aacaataattgaaatgcag

SEQ ID NO: 1442 - DNA, 19 bp, Homo sapiens
ctgcatttcaattattgtt

SEQ ID NO: 1443 - DNA, 19 bp, Homo sapiens
acaataattgaaatgcaga

SEQ ID NO: 1444 - DNA, 19 bp, Homo sapiens
tctgcatttcaattattgt

SEQ ID NO: 1445 - DNA, 19 bp, Homo sapiens
caataattgaaatgcagaa

SEQ ID NO: 1446 - DNA, 19 bp, Homo sapiens
ttctgcatttcaattattg

SEQ ID NO: 1447 - DNA, 19 bp, Homo sapiens
aataattgaaatgcagaag

SEQ ID NO: 1448 - DNA, 19 bp, Homo sapiens
cttctgcatttcaattatt

SEQ ID NO: 1449 - DNA, 19 bp, Homo sapiens
ataattgaaatgcagaagg

SEQ ID NO: 1450 - DNA, 19 bp, Homo sapiens
ccttctgcatttcaattat

SEQ ID NO: 1451 - DNA, 19 bp, Homo sapiens
taattgaaatgcagaaggg

SEQ ID NO: 1452 - DNA, 19 bp, Homo sapiens
cccttctgcatttcaatta

SEQ ID NO: 1453 - DNA, 19 bp, Homo sapiens
aattgaaatgcagaaggga

SEQ ID NO: 1454 - DNA, 19 bp, Homo sapiens
tcccttctgcatttcaatt

SEQ ID NO: 1455 - DNA, 19 bp, Homo sapiens
attgaaatgcagaagggag

SEQ ID NO: 1456 - DNA, 19 bp, Homo sapiens
ctcccttctgcatttcaat

SEQ ID NO: 1457 - DNA, 19 bp, Homo sapiens
ttgaaatgcagaagggaga

SEQ ID NO: 1458 - DNA, 19 bp, Homo sapiens
tctcccttctgcatttcaa

SEQ ID NO: 1459 - DNA, 19 bp, Homo sapiens
tgaaatgcagaagggagac

SEQ ID NO: 1460 - DNA, 19 bp, Homo sapiens
gtctcccttctgcatttca

SEQ ID NO: 1461 - DNA, 19 bp, Homo sapiens
gaaatgcagaagggagact

SEQ ID NO: 1462 - DNA, 19 bp, Homo sapiens
agtctcccttctgcatttc

SEQ ID NO: 1463 - DNA, 19 bp, Homo sapiens
aaatgcagaagggagactg

SEQ ID NO: 1464 - DNA, 19 bp, Homo sapiens
cagtctcccttctgcattt

SEQ ID NO: 1465 - DNA, 19 bp, Homo sapiens
aatgcagaagggagactgt

SEQ ID NO: 1466 - DNA, 19 bp, Homo sapiens
acagtctcccttctgcatt

SEQ ID NO: 1467 - DNA, 19 bp, Homo sapiens
atgcagaagggagactgtg

SEQ ID NO: 1468 - DNA, 19 bp, Homo sapiens
cacagtctcccttctgcat

SEQ ID NO: 1469 - DNA, 19 bp, Homo sapiens
tgcagaagggagactgtgc

SEQ ID NO: 1470 - DNA, 19 bp, Homo sapiens
gcacagtctcccttctgca

SEQ ID NO: 1471 - DNA, 19 bp, Homo sapiens
gcagaagggagactgtgca

SEQ ID NO: 1472 - DNA, 19 bp, Homo sapiens
tgcacagtctcccttctgc

SEQ ID NO: 1473 - DNA, 19 bp, Homo sapiens
cagaagggagactgtgcac

SEQ ID NO: 1474 - DNA, 19 bp, Homo sapiens
gtgcacagtctcccttctg

SEQ ID NO: 1475 - DNA, 19 bp, Homo sapiens
agaagggagactgtgcact

SEQ ID NO: 1476 - DNA, 19 bp, Homo sapiens
agtgcacagtctcccttct

SEQ ID NO: 1477 - DNA, 19 bp, Homo sapiens
gaagggagactgtgcactc

SEQ ID NO: 1478 - DNA, 19 bp, Homo sapiens
gagtgcacagtctcccttc

SEQ ID NO: 1479 - DNA, 19 bp, Homo sapiens
aagggagactgtgcactct

SEQ ID NO: 1480 - DNA, 19 bp, Homo sapiens
agagtgcacagtctccctt

SEQ ID NO: 1481 - DNA, 19 bp, Homo sapiens
agggagactgtgcactcta

SEQ ID NO: 1482 - DNA, 19 bp, Homo sapiens
tagagtgcacagtctccct

SEQ ID NO: 1483 - DNA, 19 bp, Homo sapiens
gggagactgtgcactctat

SEQ ID NO: 1484 - DNA, 19 bp, Homo sapiens
atagagtgcacagtctccc

SEQ ID NO: 1485 - DNA, 19 bp, Homo sapiens
ggagactgtgcactctatg

SEQ ID NO: 1486 - DNA, 19 bp, Homo sapiens
catagagtgcacagtctcc

SEQ ID NO: 1487 - DNA, 19 bp, Homo sapiens
gagactgtgcactctatgc

SEQ ID NO: 1488 - DNA, 19 bp, Homo sapiens
gcatagagtgcacagtctc

SEQ ID NO: 1489 - DNA, 19 bp, Homo sapiens
agactgtgcactctatgcc

SEQ ID NO: 1490 - DNA, 19 bp, Homo sapiens
ggcatagagtgcacagtct

SEQ ID NO: 1491 - DNA, 19 bp, Homo sapiens
gactgtgcactctatgcct

SEQ ID NO: 1492 - DNA, 19 bp, Homo sapiens
aggcatagagtgcacagtc

SEQ ID NO: 1493 - DNA, 19 bp, Homo sapiens
actgtgcactctatgcctc

SEQ ID NO: 1494 - DNA, 19 bp, Homo sapiens
gaggcatagagtgcacagt

SEQ ID NO: 1495 - DNA, 19 bp, Homo sapiens
ctgtgcactctatgcctcg

SEQ ID NO: 1496 - DNA, 19 bp, Homo sapiens
cgaggcatagagtgcacag

SEQ ID NO: 1497 - DNA, 19 bp, Homo sapiens
tgtgcactctatgcctcga

SEQ ID NO: 1498 - DNA, 19 bp, Homo sapiens
tcgaggcatagagtgcaca

SEQ ID NO: 1499 - DNA, 19 bp, Homo sapiens
gtgcactctatgcctcgag

SEQ ID NO: 1500 - DNA, 19 bp, Homo sapiens
ctcgaggcatagagtgcac

SEQ ID NO: 1501 - DNA, 19 bp, Homo sapiens
tgcactctatgcctcgagc

SEQ ID NO: 1502 - DNA, 19 bp, Homo sapiens
gctcgaggcatagagtgca

SEQ ID NO: 1503 - DNA, 19 bp, Homo sapiens
gcactctatgcctcgagct

SEQ ID NO: 1504 - DNA, 19 bp, Homo sapiens
agctcgaggcatagagtgc

SEQ ID NO: 1505 - DNA, 19 bp, Homo sapiens
cactctatgcctcgagctt

SEQ ID NO: 1506 - DNA, 19 bp, Homo sapiens
aagctcgaggcatagagtg

SEQ ID NO: 1507 - DNA, 19 bp, Homo sapiens
actctatgcctcgagcttt

SEQ ID NO: 1508 - DNA, 19 bp, Homo sapiens
aaagctcgaggcatagagt

SEQ ID NO: 1509 - DNA, 19 bp, Homo sapiens
ctctatgcctcgagcttta

SEQ ID NO: 1510 - DNA, 19 bp, Homo sapiens
taaagctcgaggcatagag

SEQ ID NO: 1511 - DNA, 19 bp, Homo sapiens
tctatgcctcgagctttaa

SEQ ID NO: 1512 - DNA, 19 bp, Homo sapiens
ttaaagctcgaggcataga

SEQ ID NO: 1513 - DNA, 19 bp, Homo sapiens
ctatgcctcgagctttaaa

SEQ ID NO: 1514 - DNA, 19 bp, Homo sapiens
tttaaagctcgaggcatag

SEQ ID NO: 1515 - DNA, 19 bp, Homo sapiens
tatgcctcgagctttaaag

SEQ ID NO: 1516 - DNA, 19 bp, Homo sapiens
ctttaaagctcgaggcata

SEQ ID NO: 1517 - DNA, 19 bp, Homo sapiens
atgcctcgagctttaaagg

SEQ ID NO: 1518 - DNA, 19 bp, Homo sapiens
cctttaaagctcgaggcat

SEQ ID NO: 1519 - DNA, 19 bp, Homo sapiens
tgcctcgagctttaaaggc

SEQ ID NO: 1520 - DNA, 19 bp, Homo sapiens
gcctttaaagctcgaggca

SEQ ID NO: 1521 - DNA, 19 bp, Homo sapiens
gcctcgagctttaaaggct

SEQ ID NO: 1522 - DNA, 19 bp, Homo sapiens
agcctttaaagctcgaggc

SEQ ID NO: 1523 - DNA, 19 bp, Homo sapiens
cctcgagctttaaaggcta

SEQ ID NO: 1524 - DNA, 19 bp, Homo sapiens
tagcctttaaagctcgagg

SEQ ID NO: 1525 - DNA, 19 bp, Homo sapiens
ctcgagctttaaaggctat

SEQ ID NO: 1526 - DNA, 19 bp, Homo sapiens
atagcctttaaagctcgag

SEQ ID NO: 1527 - DNA, 19 bp, Homo sapiens
tcgagctttaaaggctata

SEQ ID NO: 1528 - DNA, 19 bp, Homo sapiens
tatagcctttaaagctcga

SEQ ID NO: 1529 - DNA, 19 bp, Homo sapiens
cgagctttaaaggctatat

SEQ ID NO: 1530 - DNA, 19 bp, Homo sapiens
atatagcctttaaagctcg

SEQ ID NO: 1531 - DNA, 19 bp, Homo sapiens
gagctttaaaggctatata

SEQ ID NO: 1532 - DNA, 19 bp, Homo sapiens
tatatagcctttaaagctc

SEQ ID NO: 1533 - DNA, 19 bp, Homo sapiens
agctttaaaggctatatag

SEQ ID NO: 1534 - DNA, 19 bp, Homo sapiens
ctatatagcctttaaagct

SEQ ID NO: 1535 - DNA, 19 bp, Homo sapiens
gctttaaaggctatataga

SEQ ID NO: 1536 - DNA, 19 bp, Homo sapiens
tctatatagcctttaaagc

SEQ ID NO: 1537 - DNA, 19 bp, Homo sapiens
ctttaaaggctatatagaa

SEQ ID NO: 1538 - DNA, 19 bp, Homo sapiens
ttctatatagcctttaaag

SEQ ID NO: 1539 - DNA, 19 bp, Homo sapiens
tttaaaggctatatagaaa

SEQ ID NO: 1540 - DNA, 19 bp, Homo sapiens
tttctatatagcctttaaa

SEQ ID NO: 1541 - DNA, 19 bp, Homo sapiens
ttaaaggctatatagaaaa

SEQ ID NO: 1542 - DNA, 19 bp, Homo sapiens
ttttctatatagcctttaa

SEQ ID NO: 1543 - DNA, 19 bp, Homo sapiens
taaaggctatatagaaaac

SEQ ID NO: 1544 - DNA, 19 bp, Homo sapiens
gttttctatatagccttta

SEQ ID NO: 1545 - DNA, 19 bp, Homo sapiens
aaaggctatatagaaaact

SEQ ID NO: 1546 - DNA, 19 bp, Homo sapiens
agttttctatatagccttt

SEQ ID NO: 1547 - DNA, 19 bp, Homo sapiens
aaggctatatagaaaactg

SEQ ID NO: 1548 - DNA, 19 bp, Homo sapiens
cagttttctatatagcctt

SEQ ID NO: 1549 - DNA, 19 bp, Homo sapiens
aggctatatagaaaactgt

SEQ ID NO: 1550 - DNA, 19 bp, Homo sapiens
acagttttctatatagcct

SEQ ID NO: 1551 - DNA, 19 bp, Homo sapiens
ggctatatagaaaactgtt

SEQ ID NO: 1552 - DNA, 19 bp, Homo sapiens
aacagttttctatatagcc

SEQ ID NO: 1553 - DNA, 19 bp, Homo sapiens
gctatatagaaaactgttc

SEQ ID NO: 1554 - DNA, 19 bp, Homo sapiens
gaacagttttctatatagc

SEQ ID NO: 1555 - DNA, 19 bp, Homo sapiens
ctatatagaaaactgttca

SEQ ID NO: 1556 - DNA, 19 bp, Homo sapiens
tgaacagttttctatatag

SEQ ID NO: 1557 - DNA, 19 bp, Homo sapiens
tatatagaaaactgttcaa

SEQ ID NO: 1558 - DNA, 19 bp, Homo sapiens
ttgaacagttttctatata

SEQ ID NO: 1559 - DNA, 19 bp, Homo sapiens
atatagaaaactgttcaac

SEQ ID NO: 1560 - DNA, 19 bp, Homo sapiens
gttgaacagttttctatat

SEQ ID NO: 1561 - DNA, 19 bp, Homo sapiens
tatagaaaactgttcaact

SEQ ID NO: 1562 - DNA, 19 bp, Homo sapiens
agttgaacagttttctata

SEQ ID NO: 1563 - DNA, 19 bp, Homo sapiens
atagaaaactgttcaactc

SEQ ID NO: 1564 - DNA, 19 bp, Homo sapiens
gagttgaacagttttctat

SEQ ID NO: 1565 - DNA, 19 bp, Homo sapiens
tagaaaactgttcaactcc

SEQ ID NO: 1566 - DNA, 19 bp, Homo sapiens
ggagttgaacagttttcta

SEQ ID NO: 1567 - DNA, 19 bp, Homo sapiens
agaaaactgttcaactcca

SEQ ID NO: 1568 - DNA, 19 bp, Homo sapiens
tggagttgaacagttttct

SEQ ID NO: 1569 - DNA, 19 bp, Homo sapiens
gaaaactgttcaactccaa

SEQ ID NO: 1570 - DNA, 19 bp, Homo sapiens
ttggagttgaacagttttc

SEQ ID NO: 1571 - DNA, 19 bp, Homo sapiens
aaaactgttcaactccaaa

SEQ ID NO: 1572 - DNA, 19 bp, Homo sapiens
tttggagttgaacagtttt

SEQ ID NO: 1573 - DNA, 19 bp, Homo sapiens
aaactgttcaactccaaat

SEQ ID NO: 1574 - DNA, 19 bp, Homo sapiens
atttggagttgaacagttt

SEQ ID NO: 1575 - DNA, 19 bp, Homo sapiens
aactgttcaactccaaata

SEQ ID NO: 1576 - DNA, 19 bp, Homo sapiens
tatttggagttgaacagtt

SEQ ID NO: 1577 - DNA, 19 bp, Homo sapiens
actgttcaactccaaatac

SEQ ID NO: 1578 - DNA, 19 bp, Homo sapiens
gtatttggagttgaacagt

SEQ ID NO: 1579 - DNA, 19 bp, Homo sapiens
ctgttcaactccaaatacg

SEQ ID NO: 1580 - DNA, 19 bp, Homo sapiens
cgtatttggagttgaacag

SEQ ID NO: 1581 - DNA, 19 bp, Homo sapiens
tgttcaactccaaatacgt

SEQ ID NO: 1582 - DNA, 19 bp, Homo sapiens
acgtatttggagttgaaca

SEQ ID NO: 1583 - DNA, 19 bp, Homo sapiens
gttcaactccaaatacgta

SEQ ID NO: 1584 - DNA, 19 bp, Homo sapiens
tacgtatttggagttgaac

SEQ ID NO: 1585 - DNA, 19 bp, Homo sapiens
ttcaactccaaatacgtac

SEQ ID NO: 1586 - DNA, 19 bp, Homo sapiens
gtacgtatttggagttgaa

SEQ ID NO: 1587 - DNA, 19 bp, Homo sapiens
tcaactccaaatacgtaca

SEQ ID NO: 1588 - DNA, 19 bp, Homo sapiens
tgtacgtatttggagttga

SEQ ID NO: 1589 - DNA, 19 bp, Homo sapiens
caactccaaatacgtacat

SEQ ID NO: 1590 - DNA, 19 bp, Homo sapiens
atgtacgtatttggagttg

SEQ ID NO: 1591 - DNA, 19 bp, Homo sapiens
aactccaaatacgtacatc

SEQ ID NO: 1592 - DNA, 19 bp, Homo sapiens
gatgtacgtatttggagtt

SEQ ID NO: 1593 - DNA, 19 bp, Homo sapiens
actccaaatacgtacatct

SEQ ID NO: 1594 - DNA, 19 bp, Homo sapiens
agatgtacgtatttggagt

SEQ ID NO: 1595 - DNA, 19 bp, Homo sapiens
ctccaaatacgtacatctg

SEQ ID NO: 1596 - DNA, 19 bp, Homo sapiens
cagatgtacgtatttggag

SEQ ID NO: 1597 - DNA, 19 bp, Homo sapiens
tccaaatacgtacatctgc

SEQ ID NO: 1598 - DNA, 19 bp, Homo sapiens
gcagatgtacgtatttgga

SEQ ID NO: 1599 - DNA, 19 bp, Homo sapiens
ccaaatacgtacatctgca

SEQ ID NO: 1600 - DNA, 19 bp, Homo sapiens
tgcagatgtacgtatttgg

SEQ ID NO: 1601 - DNA, 19 bp, Homo sapiens
caaatacgtacatctgcat

SEQ ID NO: 1602 - DNA, 19 bp, Homo sapiens
atgcagatgtacgtatttg

SEQ ID NO: 1603 - DNA, 19 bp, Homo sapiens
aaatacgtacatctgcatg

SEQ ID NO: 1604 - DNA, 19 bp, Homo sapiens
catgcagatgtacgtattt

SEQ ID NO: 1605 - DNA, 19 bp, Homo sapiens
aatacgtacatctgcatgc

SEQ ID NO: 1606 - DNA, 19 bp, Homo sapiens
gcatgcagatgtacgtatt

SEQ ID NO: 1607 - DNA, 19 bp, Homo sapiens
atacgtacatctgcatgca

SEQ ID NO: 1608 - DNA, 19 bp, Homo sapiens
tgcatgcagatgtacgtat

SEQ ID NO: 1609 - DNA, 19 bp, Homo sapiens
tacgtacatctgcatgcaa

SEQ ID NO: 1610 - DNA, 19 bp, Homo sapiens
ttgcatgcagatgtacgta

SEQ ID NO: 1611 - DNA, 19 bp, Homo sapiens
acgtacatctgcatgcaaa

SEQ ID NO: 1612 - DNA, 19 bp, Homo sapiens
tttgcatgcagatgtacgt

SEQ ID NO: 1613 - DNA, 19 bp, Homo sapiens
cgtacatctgcatgcaaag

SEQ ID NO: 1614 - DNA, 19 bp, Homo sapiens
ctttgcatgcagatgtacg

SEQ ID NO: 1615 - DNA, 19 bp, Homo sapiens
gtacatctgcatgcaaagg

SEQ ID NO: 1616 - DNA, 19 bp, Homo sapiens
cctttgcatgcagatgtac

SEQ ID NO: 1617 - DNA, 19 bp, Homo sapiens
tacatctgcatgcaaagga

SEQ ID NO: 1618 - DNA, 19 bp, Homo sapiens
tcctttgcatgcagatgta

SEQ ID NO: 1619 - DNA, 19 bp, Homo sapiens
acatctgcatgcaaaggac

SEQ ID NO: 1620 - DNA, 19 bp, Homo sapiens
gtcctttgcatgcagatgt

SEQ ID NO: 1621 - DNA, 19 bp, Homo sapiens
catctgcatgcaaaggact

SEQ ID NO: 1622 - DNA, 19 bp, Homo sapiens
agtcctttgcatgcagatg

SEQ ID NO: 1623 - DNA, 19 bp, Homo sapiens
atctgcatgcaaaggactg

SEQ ID NO: 1624 - DNA, 19 bp, Homo sapiens
cagtcctttgcatgcagat

SEQ ID NO: 1625 - DNA, 19 bp, Homo sapiens
tctgcatgcaaaggactgt

SEQ ID NO: 1626 - DNA, 19 bp, Homo sapiens
acagtcctttgcatgcaga

SEQ ID NO: 1627 - DNA, 19 bp, Homo sapiens
ctgcatgcaaaggactgtg

SEQ ID NO: 1628 - DNA, 19 bp, Homo sapiens
cacagtcctttgcatgcag

SEQ ID NO: 1629 - DNA, 19 bp, Homo sapiens
tgcatgcaaaggactgtgt

SEQ ID NO: 1630 - DNA, 19 bp, Homo sapiens
acacagtcctttgcatgca

SEQ ID NO: 1631 - DNA, 19 bp, Homo sapiens
gcatgcaaaggactgtgta

SEQ ID NO: 1632 - DNA, 19 bp, Homo sapiens
tacacagtcctttgcatgc

SEQ ID NO: 1633 - DNA, 19 bp, Homo sapiens
catgcaaaggactgtgtaa

SEQ ID NO: 1634 - DNA, 19 bp, Homo sapiens
ttacacagtcctttgcatg

SEQ ID NO: 1635 - DNA, 19 bp, Homo sapiens
atgcaaaggactgtgtaaa

SEQ ID NO: 1636 - DNA, 19 bp, Homo sapiens
tttacacagtcctttgcat

SEQ ID NO: 1637 - DNA, 19 bp, Homo sapiens
tgcaaaggactgtgtaaag

SEQ ID NO: 1638 - DNA, 19 bp, Homo sapiens
ctttacacagtcctttgca

SEQ ID NO: 1639 - DNA, 19 bp, Homo sapiens
gcaaaggactgtgtaaaga

SEQ ID NO: 1640 - DNA, 19 bp, Homo sapiens
tctttacacagtcctttgc

SEQ ID NO: 1641 - DNA, 19 bp, Homo sapiens
caaaggactgtgtaaagat

SEQ ID NO: 1642 - DNA, 19 bp, Homo sapiens
atctttacacagtcctttg

SEQ ID NO: 1643 - DNA, 19 bp, Homo sapiens
aaaggactgtgtaaagatg

SEQ ID NO: 1644 - DNA, 19 bp, Homo sapiens
catctttacacagtccttt

SEQ ID NO: 1645 - DNA, 19 bp, Homo sapiens
aaggactgtgtaaagatga

SEQ ID NO: 1646 - DNA, 19 bp, Homo sapiens
tcatctttacacagtcctt

SEQ ID NO: 1647 - DNA, 19 bp, Homo sapiens
aggactgtgtaaagatgat

SEQ ID NO: 1648 - DNA, 19 bp, Homo sapiens
atcatctttacacagtcct

SEQ ID NO: 1649 - DNA, 19 bp, Homo sapiens
ggactgtgtaaagatgatc

SEQ ID NO: 1650 - DNA, 19 bp, Homo sapiens
gatcatctttacacagtcc

SEQ ID NO: 1651 - DNA, 19 bp, Homo sapiens
gactgtgtaaagatgatca

SEQ ID NO: 1652 - DNA, 19 bp, Homo sapiens
tgatcatctttacacagtc

SEQ ID NO: 1653 - DNA, 19 bp, Homo sapiens
actgtgtaaagatgatcaa

SEQ ID NO: 1654 - DNA, 19 bp, Homo sapiens
ttgatcatctttacacagt

SEQ ID NO: 1655 - DNA, 19 bp, Homo sapiens
ctgtgtaaagatgatcaac

SEQ ID NO: 1656 - DNA, 19 bp, Homo sapiens
gttgatcatctttacacag

SEQ ID NO: 1657 - DNA, 19 bp, Homo sapiens
tgtgtaaagatgatcaacc

SEQ ID NO: 1658 - DNA, 19 bp, Homo sapiens
ggttgatcatctttacaca

SEQ ID NO: 1659 - DNA, 19 bp, Homo sapiens
gtgtaaagatgatcaacca

SEQ ID NO: 1660 - DNA, 19 bp, Homo sapiens
tggttgatcatctttacac

SEQ ID NO: 1661 - DNA, 19 bp, Homo sapiens
tgtaaagatgatcaaccat

SEQ ID NO: 1662 - DNA, 19 bp, Homo sapiens
atggttgatcatctttaca

SEQ ID NO: 1663 - DNA, 19 bp, Homo sapiens
gtaaagatgatcaaccatc

SEQ ID NO: 1664 - DNA, 19 bp, Homo sapiens
gatggttgatcatctttac

SEQ ID NO: 1665 - DNA, 19 bp, Homo sapiens
taaagatgatcaaccatct

SEQ ID NO: 1666 - DNA, 19 bp, Homo sapiens
agatggttgatcatcttta

SEQ ID NO: 1667 - DNA, 19 bp, Homo sapiens
aaagatgatcaaccatctc

SEQ ID NO: 1668 - DNA, 19 bp, Homo sapiens
gagatggttgatcatcttt

SEQ ID NO: 1669 - DNA, 19 bp, Homo sapiens
aagatgatcaaccatctca

SEQ ID NO: 1670 - DNA, 19 bp, Homo sapiens
tgagatggttgatcatctt

SEQ ID NO: 1671 - DNA, 19 bp, Homo sapiens
agatgatcaaccatctcaa

SEQ ID NO: 1672 - DNA, 19 bp, Homo sapiens
ttgagatggttgatcatct

SEQ ID NO: 1673 - DNA, 19 bp, Homo sapiens
gatgatcaaccatctcaat

SEQ ID NO: 1674 - DNA, 19 bp, Homo sapiens
attgagatggttgatcatc

SEQ ID NO: 1675 - DNA, 19 bp, Homo sapiens
atgatcaaccatctcaata

SEQ ID NO: 1676 - DNA, 19 bp, Homo sapiens
tattgagatggttgatcat

SEQ ID NO: 1677 - DNA, 19 bp, Homo sapiens
tgatcaaccatctcaataa

SEQ ID NO: 1678 - DNA, 19 bp, Homo sapiens
ttattgagatggttgatca

SEQ ID NO: 1679 - DNA, 19 bp, Homo sapiens
gatcaaccatctcaataaa

SEQ ID NO: 1680 - DNA, 19 bp, Homo sapiens
tttattgagatggttgatc

SEQ ID NO: 1681 - DNA, 19 bp, Homo sapiens
atcaaccatctcaataaaa

SEQ ID NO: 1682 - DNA, 19 bp, Homo sapiens
ttttattgagatggttgat

SEQ ID NO: 1683 - DNA, 19 bp, Homo sapiens
tcaaccatctcaataaaag

SEQ ID NO: 1684 - DNA, 19 bp, Homo sapiens
cttttattgagatggttga

SEQ ID NO: 1685 - DNA, 19 bp, Homo sapiens
caaccatctcaataaaagc

SEQ ID NO: 1686 - DNA, 19 bp, Homo sapiens
gcttttattgagatggttg

SEQ ID NO: 1687 - DNA, 19 bp, Homo sapiens
aaccatctcaataaaagcc

SEQ ID NO: 1688 - DNA, 19 bp, Homo sapiens
ggcttttattgagatggtt

SEQ ID NO: 1689 - DNA, 19 bp, Homo sapiens
accatctcaataaaagcca

SEQ ID NO: 1690 - DNA, 19 bp, Homo sapiens
tggcttttattgagatggt

SEQ ID NO: 1691 - DNA, 19 bp, Homo sapiens
ccatctcaataaaagccag

SEQ ID NO: 1692 - DNA, 19 bp, Homo sapiens
ctggcttttattgagatgg

SEQ ID NO: 1693 - DNA, 19 bp, Homo sapiens
catctcaataaaagccagg

SEQ ID NO: 1694 - DNA, 19 bp, Homo sapiens
cctggcttttattgagatg

SEQ ID NO: 1695 - DNA, 19 bp, Homo sapiens
atctcaataaaagccagga

SEQ ID NO: 1696 - DNA, 19 bp, Homo sapiens
tcctggcttttattgagat

SEQ ID NO: 1697 - DNA, 19 bp, Homo sapiens
tctcaataaaagccaggaa

SEQ ID NO: 1698 - DNA, 19 bp, Homo sapiens
ttcctggcttttattgaga

SEQ ID NO: 1699 - DNA, 19 bp, Homo sapiens
ctcaataaaagccaggaac

SEQ ID NO: 1700 - DNA, 19 bp, Homo sapiens
gttcctggcttttattgag

SEQ ID NO: 1701 - DNA, 19 bp, Homo sapiens
tcaataaaagccaggaaca

SEQ ID NO: 1702 - DNA, 19 bp, Homo sapiens
tgttcctggcttttattga

SEQ ID NO: 1703 - DNA, 19 bp, Homo sapiens
caataaaagccaggaacag

SEQ ID NO: 1704 - DNA, 19 bp, Homo sapiens
ctgttcctggcttttattg

SEQ ID NO: 1705 - DNA, 19 bp, Homo sapiens
aataaaagccaggaacaga

SEQ ID NO: 1706 - DNA, 19 bp, Homo sapiens
tctgttcctggcttttatt

SEQ ID NO: 1707 - DNA, 19 bp, Homo sapiens
ataaaagccaggaacagag

SEQ ID NO: 1708 - DNA, 19 bp, Homo sapiens
ctctgttcctggcttttat

SEQ ID NO: 1709 - DNA, 19 bp, Homo sapiens
taaaagccaggaacagaga

SEQ ID NO: 1710 - DNA, 19 bp, Homo sapiens
tctctgttcctggctttta

SEQ ID NO: 1711 - DNA, 19 bp, Homo sapiens
aaaagccaggaacagagaa

SEQ ID NO: 1712 - DNA, 19 bp, Homo sapiens
ttctctgttcctggctttt

SEQ ID NO: 1713 - DNA, 19 bp, Homo sapiens
aaagccaggaacagagaag

SEQ ID NO: 1714 - DNA, 19 bp, Homo sapiens
cttctctgttcctggcttt

SEQ ID NO: 1715 - DNA, 19 bp, Homo sapiens
aagccaggaacagagaaga

SEQ ID NO: 1716 - DNA, 19 bp, Homo sapiens
tcttctctgttcctggctt

SEQ ID NO: 1717 - DNA, 19 bp, Homo sapiens
agccaggaacagagaagag

SEQ ID NO: 1718 - DNA, 19 bp, Homo sapiens
ctcttctctgttcctggct

SEQ ID NO: 1719 - DNA, 19 bp, Homo sapiens
gccaggaacagagaagaga

SEQ ID NO: 1720 - DNA, 19 bp, Homo sapiens
tctcttctctgttcctggc

SEQ ID NO: 1721 - DNA, 19 bp, Homo sapiens
ccaggaacagagaagagat

SEQ ID NO: 1722 - DNA, 19 bp, Homo sapiens
atctcttctctgttcctgg

SEQ ID NO: 1723 - DNA, 19 bp, Homo sapiens
caggaacagagaagagatt

SEQ ID NO: 1724 - DNA, 19 bp, Homo sapiens
aatctcttctctgttcctg

SEQ ID NO: 1725 - DNA, 19 bp, Homo sapiens
aggaacagagaagagatta

SEQ ID NO: 1726 - DNA, 19 bp, Homo sapiens
taatctcttctctgttcct

SEQ ID NO: 1727 - DNA, 19 bp, Homo sapiens
ggaacagagaagagattac

SEQ ID NO: 1728 - DNA, 19 bp, Homo sapiens
gtaatctcttctctgttcc

SEQ ID NO: 1729 - DNA, 19 bp, Homo sapiens
gaacagagaagagattaca

SEQ ID NO: 1730 - DNA, 19 bp, Homo sapiens
tgtaatctcttctctgttc

SEQ ID NO: 1731 - DNA, 19 bp, Homo sapiens
aacagagaagagattacac

SEQ ID NO: 1732 - DNA, 19 bp, Homo sapiens
gtgtaatctcttctctgtt

SEQ ID NO: 1733 - DNA, 19 bp, Homo sapiens
acagagaagagattacacc

SEQ ID NO: 1734 - DNA, 19 bp, Homo sapiens
ggtgtaatctcttctctgt

SEQ ID NO: 1735 - DNA, 19 bp, Homo sapiens
cagagaagagattacacca

SEQ ID NO: 1736 - DNA, 19 bp, Homo sapiens
tggtgtaatctcttctctg

SEQ ID NO: 1737 - DNA, 19 bp, Homo sapiens
agagaagagattacaccag

SEQ ID NO: 1738 - DNA, 19 bp, Homo sapiens
ctggtgtaatctcttctct

SEQ ID NO: 1739 - DNA, 19 bp, Homo sapiens
gagaagagattacaccagc

SEQ ID NO: 1740 - DNA, 19 bp, Homo sapiens
gctggtgtaatctcttctc

SEQ ID NO: 1741 - DNA, 19 bp, Homo sapiens
agaagagattacaccagcg

SEQ ID NO: 1742 - DNA, 19 bp, Homo sapiens
cgctggtgtaatctcttct

SEQ ID NO: 1743 - DNA, 19 bp, Homo sapiens
gaagagattacaccagcgg

SEQ ID NO: 1744 - DNA, 19 bp, Homo sapiens
ccgctggtgtaatctcttc

SEQ ID NO: 1745 - DNA, 19 bp, Homo sapiens
aagagattacaccagcggt

SEQ ID NO: 1746 - DNA, 19 bp, Homo sapiens
accgctggtgtaatctctt

SEQ ID NO: 1747 - DNA, 19 bp, Homo sapiens
agagattacaccagcggta

SEQ ID NO: 1748 - DNA, 19 bp, Homo sapiens
taccgctggtgtaatctct

SEQ ID NO: 1749 - DNA, 19 bp, Homo sapiens
gagattacaccagcggtaa

SEQ ID NO: 1750 - DNA, 19 bp, Homo sapiens
ttaccgctggtgtaatctc

SEQ ID NO: 1751 - DNA, 19 bp, Homo sapiens
agattacaccagcggtaac

SEQ ID NO: 1752 - DNA, 19 bp, Homo sapiens
gttaccgctggtgtaatct

SEQ ID NO: 1753 - DNA, 19 bp, Homo sapiens
gattacaccagcggtaaca

SEQ ID NO: 1754 - DNA, 19 bp, Homo sapiens
tgttaccgctggtgtaatc

SEQ ID NO: 1755 - DNA, 19 bp, Homo sapiens
attacaccagcggtaacac

SEQ ID NO: 1756 - DNA, 19 bp, Homo sapiens
gtgttaccgctggtgtaat

SEQ ID NO: 1757 - DNA, 19 bp, Homo sapiens
ttacaccagcggtaacact

SEQ ID NO: 1758 - DNA, 19 bp, Homo sapiens
agtgttaccgctggtgtaa

SEQ ID NO: 1759 - DNA, 19 bp, Homo sapiens
tacaccagcggtaacactg

SEQ ID NO: 1760 - DNA, 19 bp, Homo sapiens
cagtgttaccgctggtgta

SEQ ID NO: 1761 - DNA, 19 bp, Homo sapiens
acaccagcggtaacactgc

SEQ ID NO: 1762 - DNA, 19 bp, Homo sapiens
gcagtgttaccgctggtgt

SEQ ID NO: 1763 - DNA, 19 bp, Homo sapiens
caccagcggtaacactgcc

SEQ ID NO: 1764 - DNA, 19 bp, Homo sapiens
ggcagtgttaccgctggtg

SEQ ID NO: 1765 - DNA, 19 bp, Homo sapiens
accagcggtaacactgcca

SEQ ID NO: 1766 - DNA, 19 bp, Homo sapiens
tggcagtgttaccgctggt

SEQ ID NO: 1767 - DNA, 19 bp, Homo sapiens
ccagcggtaacactgccaa

SEQ ID NO: 1768 - DNA, 19 bp, Homo sapiens
ttggcagtgttaccgctgg

SEQ ID NO: 1769 - DNA, 19 bp, Homo sapiens
cagcggtaacactgccaac

SEQ ID NO: 1770 - DNA, 19 bp, Homo sapiens
gttggcagtgttaccgctg

SEQ ID NO: 1771 - DNA, 19 bp, Homo sapiens
agcggtaacactgccaact

SEQ ID NO: 1772 - DNA, 19 bp, Homo sapiens
agttggcagtgttaccgct

SEQ ID NO: 1773 - DNA, 19 bp, Homo sapiens
gcggtaacactgccaactg

SEQ ID NO: 1774 - DNA, 19 bp, Homo sapiens
cagttggcagtgttaccgc

SEQ ID NO: 1775 - DNA, 19 bp, Homo sapiens
cggtaacactgccaactga

SEQ ID NO: 1776 - DNA, 19 bp, Homo sapiens
tcagttggcagtgttaccg

SEQ ID NO: 1777 - DNA, 19 bp, Homo sapiens
ggtaacactgccaactgag

SEQ ID NO: 1778 - DNA, 19 bp, Homo sapiens
ctcagttggcagtgttacc

SEQ ID NO: 1779 - DNA, 19 bp, Homo sapiens
gtaacactgccaactgaga

SEQ ID NO: 1780 - DNA, 19 bp, Homo sapiens
tctcagttggcagtgttac

SEQ ID NO: 1781 - DNA, 19 bp, Homo sapiens
taacactgccaactgagac

SEQ ID NO: 1782 - DNA, 19 bp, Homo sapiens
gtctcagttggcagtgtta

SEQ ID NO: 1783 - DNA, 19 bp, Homo sapiens
aacactgccaactgagact

SEQ ID NO: 1784 - DNA, 19 bp, Homo sapiens
agtctcagttggcagtgtt

SEQ ID NO: 1785 - DNA, 19 bp, Homo sapiens
acactgccaactgagacta

SEQ ID NO: 1786 - DNA, 19 bp, Homo sapiens
tagtctcagttggcagtgt

SEQ ID NO: 1787 - DNA, 19 bp, Homo sapiens
cactgccaactgagactaa

SEQ ID NO: 1788 - DNA, 19 bp, Homo sapiens
ttagtctcagttggcagtg

SEQ ID NO: 1789 - DNA, 19 bp, Homo sapiens
actgccaactgagactaaa

SEQ ID NO: 1790 - DNA, 19 bp, Homo sapiens
tttagtctcagttggcagt

SEQ ID NO: 1791 - DNA, 19 bp, Homo sapiens
ctgccaactgagactaaag

SEQ ID NO: 1792 - DNA, 19 bp, Homo sapiens
ctttagtctcagttggcag

SEQ ID NO: 1793 - DNA, 19 bp, Homo sapiens
tgccaactgagactaaagg

SEQ ID NO: 1794 - DNA, 19 bp, Homo sapiens
cctttagtctcagttggca

SEQ ID NO: 1795 - DNA, 19 bp, Homo sapiens
gccaactgagactaaagga

SEQ ID NO: 1796 - DNA, 19 bp, Homo sapiens
tcctttagtctcagttggc

SEQ ID NO: 1797 - DNA, 19 bp, Homo sapiens
ccaactgagactaaaggaa

SEQ ID NO: 1798 - DNA, 19 bp, Homo sapiens
ttcctttagtctcagttgg

SEQ ID NO: 1799 - DNA, 19 bp, Homo sapiens
caactgagactaaaggaaa

SEQ ID NO: 1800 - DNA, 19 bp, Homo sapiens
tttcctttagtctcagttg

SEQ ID NO: 1801 - DNA, 19 bp, Homo sapiens
aactgagactaaaggaaac

SEQ ID NO: 1802 - DNA, 19 bp, Homo sapiens
gtttcctttagtctcagtt

SEQ ID NO: 1803 - DNA, 19 bp, Homo sapiens
actgagactaaaggaaaca

SEQ ID NO: 1804 - DNA, 19 bp, Homo sapiens
tgtttcctttagtctcagt

SEQ ID NO: 1805 - DNA, 19 bp, Homo sapiens
ctgagactaaaggaaacaa

SEQ ID NO: 1806 - DNA, 19 bp, Homo sapiens
ttgtttcctttagtctcag

SEQ ID NO: 1807 - DNA, 19 bp, Homo sapiens
tgagactaaaggaaacaaa

SEQ ID NO: 1808 - DNA, 19 bp, Homo sapiens
tttgtttcctttagtctca

SEQ ID NO: 1809 - DNA, 19 bp, Homo sapiens
gagactaaaggaaacaaac

SEQ ID NO: 1810 - DNA, 19 bp, Homo sapiens
gtttgtttcctttagtctc

SEQ ID NO: 1811 - DNA, 19 bp, Homo sapiens
agactaaaggaaacaaaca

SEQ ID NO: 1812 - DNA, 19 bp, Homo sapiens
tgtttgtttcctttagtct

SEQ ID NO: 1813 - DNA, 19 bp, Homo sapiens
gactaaaggaaacaaacaa

SEQ ID NO: 1814 - DNA, 19 bp, Homo sapiens
ttgtttgtttcctttagtc

SEQ ID NO: 1815 - DNA, 19 bp, Homo sapiens
actaaaggaaacaaacaaa

SEQ ID NO: 1816 - DNA, 19 bp, Homo sapiens
tttgtttgtttcctttagt

SEQ ID NO: 1817 - DNA, 19 bp, Homo sapiens
ctaaaggaaacaaacaaaa

SEQ ID NO: 1818 - DNA, 19 bp, Homo sapiens
ttttgtttgtttcctttag

SEQ ID NO: 1819 - DNA, 19 bp, Homo sapiens
taaaggaaacaaacaaaaa

SEQ ID NO: 1820 - DNA, 19 bp, Homo sapiens
tttttgtttgtttccttta

SEQ ID NO: 1821 - DNA, 19 bp, Homo sapiens
aaaggaaacaaacaaaaac

SEQ ID NO: 1822 - DNA, 19 bp, Homo sapiens
gtttttgtttgtttccttt

SEQ ID NO: 1823 - DNA, 19 bp, Homo sapiens
aaggaaacaaacaaaaaca

SEQ ID NO: 1824 - DNA, 19 bp, Homo sapiens
tgtttttgtttgtttcctt

SEQ ID NO: 1825 - DNA, 19 bp, Homo sapiens
aggaaacaaacaaaaacag

SEQ ID NO: 1826 - DNA, 19 bp, Homo sapiens
ctgtttttgtttgtttcct

SEQ ID NO: 1827 - DNA, 19 bp, Homo sapiens
ggaaacaaacaaaaacagg

SEQ ID NO: 1828 - DNA, 19 bp, Homo sapiens
cctgtttttgtttgtttcc

SEQ ID NO: 1829 - DNA, 19 bp, Homo sapiens
gaaacaaacaaaaacagga

SEQ ID NO: 1830 - DNA, 19 bp, Homo sapiens
tcctgtttttgtttgtttc

SEQ ID NO: 1831 - DNA, 19 bp, Homo sapiens
aaacaaacaaaaacaggac

SEQ ID NO: 1832 - DNA, 19 bp, Homo sapiens
gtcctgtttttgtttgttt

SEQ ID NO: 1833 - DNA, 19 bp, Homo sapiens
aacaaacaaaaacaggaca

SEQ ID NO: 1834 - DNA, 19 bp, Homo sapiens
tgtcctgtttttgtttgtt

SEQ ID NO: 1835 - DNA, 19 bp, Homo sapiens
acaaacaaaaacaggacaa

SEQ ID NO: 1836 - DNA, 19 bp, Homo sapiens
ttgtcctgtttttgtttgt

SEQ ID NO: 1837 - DNA, 19 bp, Homo sapiens
caaacaaaaacaggacaaa

SEQ ID NO: 1838 - DNA, 19 bp, Homo sapiens
tttgtcctgtttttgtttg

SEQ ID NO: 1839 - DNA, 19 bp, Homo sapiens
aaacaaaaacaggacaaaa

SEQ ID NO: 1840 - DNA, 19 bp, Homo sapiens
ttttgtcctgtttttgttt

SEQ ID NO: 1841 - DNA, 19 bp, Homo sapiens
aacaaaaacaggacaaaat

SEQ ID NO: 1842 - DNA, 19 bp, Homo sapiens
attttgtcctgtttttgtt

SEQ ID NO: 1843 - DNA, 19 bp, Homo sapiens
acaaaaacaggacaaaatg

SEQ ID NO: 1844 - DNA, 19 bp, Homo sapiens
cattttgtcctgtttttgt

SEQ ID NO: 1845 - DNA, 19 bp, Homo sapiens
caaaaacaggacaaaatga

SEQ ID NO: 1846 - DNA, 19 bp, Homo sapiens
tcattttgtcctgtttttg

SEQ ID NO: 1847 - DNA, 19 bp, Homo sapiens
aaaaacaggacaaaatgac

SEQ ID NO: 1848 - DNA, 19 bp, Homo sapiens
gtcattttgtcctgttttt

SEQ ID NO: 1849 - DNA, 19 bp, Homo sapiens
aaaacaggacaaaatgacc

SEQ ID NO: 1850 - DNA, 19 bp, Homo sapiens
ggtcattttgtcctgtttt

SEQ ID NO: 1851 - DNA, 19 bp, Homo sapiens
aaacaggacaaaatgacca

SEQ ID NO: 1852 - DNA, 19 bp, Homo sapiens
tggtcattttgtcctgttt

SEQ ID NO: 1853 - DNA, 19 bp, Homo sapiens
aacaggacaaaatgaccaa

SEQ ID NO: 1854 - DNA, 19 bp, Homo sapiens
ttggtcattttgtcctgtt

SEQ ID NO: 1855 - DNA, 19 bp, Homo sapiens
acaggacaaaatgaccaaa

SEQ ID NO: 1856 - DNA, 19 bp, Homo sapiens
tttggtcattttgtcctgt

SEQ ID NO: 1857 - DNA, 19 bp, Homo sapiens
caggacaaaatgaccaaag

SEQ ID NO: 1858 - DNA, 19 bp, Homo sapiens
ctttggtcattttgtcctg

SEQ ID NO: 1859 - DNA, 19 bp, Homo sapiens
aggacaaaatgaccaaaga

SEQ ID NO: 1860 - DNA, 19 bp, Homo sapiens
tctttggtcattttgtcct

SEQ ID NO: 1861 - DNA, 19 bp, Homo sapiens
ggacaaaatgaccaaagac

SEQ ID NO: 1862 - DNA, 19 bp, Homo sapiens
gtctttggtcattttgtcc

SEQ ID NO: 1863 - DNA, 19 bp, Homo sapiens
gacaaaatgaccaaagact

SEQ ID NO: 1864 - DNA, 19 bp, Homo sapiens
agtctttggtcattttgtc

SEQ ID NO: 1865 - DNA, 19 bp, Homo sapiens
acaaaatgaccaaagactg

SEQ ID NO: 1866 - DNA, 19 bp, Homo sapiens
cagtctttggtcattttgt

SEQ ID NO: 1867 - DNA, 19 bp, Homo sapiens
caaaatgaccaaagactgt

SEQ ID NO: 1868 - DNA, 19 bp, Homo sapiens
acagtctttggtcattttg

SEQ ID NO: 1869 - DNA, 19 bp, Homo sapiens
aaaatgaccaaagactgtc

SEQ ID NO: 1870 - DNA, 19 bp, Homo sapiens
gacagtctttggtcatttt

SEQ ID NO: 1871 - DNA, 19 bp, Homo sapiens
aaatgaccaaagactgtca

SEQ ID NO: 1872 - DNA, 19 bp, Homo sapiens
tgacagtctttggtcattt

SEQ ID NO: 1873 - DNA, 19 bp, Homo sapiens
aatgaccaaagactgtcag

SEQ ID NO: 1874 - DNA, 19 bp, Homo sapiens
ctgacagtctttggtcatt

SEQ ID NO: 1875 - DNA, 19 bp, Homo sapiens
atgaccaaagactgtcaga

SEQ ID NO: 1876 - DNA, 19 bp, Homo sapiens
tctgacagtctttggtcat

SEQ ID NO: 1877 - DNA, 19 bp, Homo sapiens
tgaccaaagactgtcagat

SEQ ID NO: 1878 - DNA, 19 bp, Homo sapiens
atctgacagtctttggtca

SEQ ID NO: 1879 - DNA, 19 bp, Homo sapiens
gaccaaagactgtcagatt

SEQ ID NO: 1880 - DNA, 19 bp, Homo sapiens
aatctgacagtctttggtc

SEQ ID NO: 1881 - DNA, 19 bp, Homo sapiens
accaaagactgtcagattt

SEQ ID NO: 1882 - DNA, 19 bp, Homo sapiens
aaatctgacagtctttggt

SEQ ID NO: 1883 - DNA, 19 bp, Homo sapiens
ccaaagactgtcagatttc

SEQ ID NO: 1884 - DNA, 19 bp, Homo sapiens
gaaatctgacagtctttgg

SEQ ID NO: 1885 - DNA, 19 bp, Homo sapiens
caaagactgtcagatttct

SEQ ID NO: 1886 - DNA, 19 bp, Homo sapiens
agaaatctgacagtctttg

SEQ ID NO: 1887 - DNA, 19 bp, Homo sapiens
aaagactgtcagatttctt

SEQ ID NO: 1888 - DNA, 19 bp, Homo sapiens
aagaaatctgacagtcttt

SEQ ID NO: 1889 - DNA, 19 bp, Homo sapiens
aagactgtcagatttctta

SEQ ID NO: 1890 - DNA, 19 bp, Homo sapiens
taagaaatctgacagtctt

SEQ ID NO: 1891 - DNA, 19 bp, Homo sapiens
agactgtcagatttcttag

SEQ ID NO: 1892 - DNA, 19 bp, Homo sapiens
ctaagaaatctgacagtct

SEQ ID NO: 1893 - DNA, 19 bp, Homo sapiens
gactgtcagatttcttaga

SEQ ID NO: 1894 - DNA, 19 bp, Homo sapiens
tctaagaaatctgacagtc

SEQ ID NO: 1895 - DNA, 19 bp, Homo sapiens
actgtcagatttcttagac

SEQ ID NO: 1896 - DNA, 19 bp, Homo sapiens
gtctaagaaatctgacagt

SEQ ID NO: 1897 - DNA, 19 bp, Homo sapiens
ctgtcagatttcttagact

SEQ ID NO: 1898 - DNA, 19 bp, Homo sapiens
agtctaagaaatctgacag

SEQ ID NO: 1899 - DNA, 19 bp, Homo sapiens
tgtcagatttcttagactc

SEQ ID NO: 1900 - DNA, 19 bp, Homo sapiens
gagtctaagaaatctgaca

SEQ ID NO: 1901 - DNA, 19 bp, Homo sapiens
gtcagatttcttagactcc

SEQ ID NO: 1902 - DNA, 19 bp, Homo sapiens
ggagtctaagaaatctgac

SEQ ID NO: 1903 - DNA, 19 bp, Homo sapiens
tcagatttcttagactcca

SEQ ID NO: 1904 - DNA, 19 bp, Homo sapiens
tggagtctaagaaatctga

SEQ ID NO: 1905 - DNA, 19 bp, Homo sapiens
cagatttcttagactccac

SEQ ID NO: 1906 - DNA, 19 bp, Homo sapiens
gtggagtctaagaaatctg

SEQ ID NO: 1907 - DNA, 19 bp, Homo sapiens
agatttcttagactccaca

SEQ ID NO: 1908 - DNA, 19 bp, Homo sapiens
tgtggagtctaagaaatct

SEQ ID NO: 1909 - DNA, 19 bp, Homo sapiens
gatttcttagactccacag

SEQ ID NO: 1910 - DNA, 19 bp, Homo sapiens
ctgtggagtctaagaaatc

SEQ ID NO: 1911 - DNA, 19 bp, Homo sapiens
atttcttagactccacagg

SEQ ID NO: 1912 - DNA, 19 bp, Homo sapiens
cctgtggagtctaagaaat

SEQ ID NO: 1913 - DNA, 19 bp, Homo sapiens
tttcttagactccacagga

SEQ ID NO: 1914 - DNA, 19 bp, Homo sapiens
tcctgtggagtctaagaaa

SEQ ID NO: 1915 - DNA, 19 bp, Homo sapiens
ttcttagactccacaggac

SEQ ID NO: 1916 - DNA, 19 bp, Homo sapiens
gtcctgtggagtctaagaa

SEQ ID NO: 1917 - DNA, 19 bp, Homo sapiens
tcttagactccacaggacc

SEQ ID NO: 1918 - DNA, 19 bp, Homo sapiens
ggtcctgtggagtctaaga

SEQ ID NO: 1919 - DNA, 19 bp, Homo sapiens
cttagactccacaggacca

SEQ ID NO: 1920 - DNA, 19 bp, Homo sapiens
tggtcctgtggagtctaag

SEQ ID NO: 1921 - DNA, 19 bp, Homo sapiens
ttagactccacaggaccaa

SEQ ID NO: 1922 - DNA, 19 bp, Homo sapiens
ttggtcctgtggagtctaa

SEQ ID NO: 1923 - DNA, 19 bp, Homo sapiens
tagactccacaggaccaaa

SEQ ID NO: 1924 - DNA, 19 bp, Homo sapiens
tttggtcctgtggagtcta

SEQ ID NO: 1925 - DNA, 19 bp, Homo sapiens
agactccacaggaccaaac

SEQ ID NO: 1926 - DNA, 19 bp, Homo sapiens
gtttggtcctgtggagtct

SEQ ID NO: 1927 - DNA, 19 bp, Homo sapiens
gactccacaggaccaaacc

SEQ ID NO: 1928 - DNA, 19 bp, Homo sapiens
ggtttggtcctgtggagtc

SEQ ID NO: 1929 - DNA, 19 bp, Homo sapiens
actccacaggaccaaacca

SEQ ID NO: 1930 - DNA, 19 bp, Homo sapiens
tggtttggtcctgtggagt

SEQ ID NO: 1931 - DNA, 19 bp, Homo sapiens
ctccacaggaccaaaccat

SEQ ID NO: 1932 - DNA, 19 bp, Homo sapiens
atggtttggtcctgtggag

SEQ ID NO: 1933 - DNA, 19 bp, Homo sapiens
tccacaggaccaaaccata

SEQ ID NO: 1934 - DNA, 19 bp, Homo sapiens
tatggtttggtcctgtgga

SEQ ID NO: 1935 - DNA, 19 bp, Homo sapiens
ccacaggaccaaaccatag

SEQ ID NO: 1936 - DNA, 19 bp, Homo sapiens
ctatggtttggtcctgtgg

SEQ ID NO: 1937 - DNA, 19 bp, Homo sapiens
cacaggaccaaaccataga

SEQ ID NO: 1938 - DNA, 19 bp, Homo sapiens
tctatggtttggtcctgtg

SEQ ID NO: 1939 - DNA, 19 bp, Homo sapiens
acaggaccaaaccatagaa

SEQ ID NO: 1940 - DNA, 19 bp, Homo sapiens
ttctatggtttggtcctgt

SEQ ID NO: 1941 - DNA, 19 bp, Homo sapiens
caggaccaaaccatagaac

SEQ ID NO: 1942 - DNA, 19 bp, Homo sapiens
gttctatggtttggtcctg

SEQ ID NO: 1943 - DNA, 19 bp, Homo sapiens
aggaccaaaccatagaaca

SEQ ID NO: 1944 - DNA, 19 bp, Homo sapiens
tgttctatggtttggtcct

SEQ ID NO: 1945 - DNA, 19 bp, Homo sapiens
ggaccaaaccatagaacaa

SEQ ID NO: 1946 - DNA, 19 bp, Homo sapiens
ttgttctatggtttggtcc

SEQ ID NO: 1947 - DNA, 19 bp, Homo sapiens
gaccaaaccatagaacaat

SEQ ID NO: 1948 - DNA, 19 bp, Homo sapiens
attgttctatggtttggtc

SEQ ID NO: 1949 - DNA, 19 bp, Homo sapiens
accaaaccatagaacaatt

SEQ ID NO: 1950 - DNA, 19 bp, Homo sapiens
aattgttctatggtttggt

SEQ ID NO: 1951 - DNA, 19 bp, Homo sapiens
ccaaaccatagaacaattt

SEQ ID NO: 1952 - DNA, 19 bp, Homo sapiens
aaattgttctatggtttgg

SEQ ID NO: 1953 - DNA, 19 bp, Homo sapiens
caaaccatagaacaatttc

SEQ ID NO: 1954 - DNA, 19 bp, Homo sapiens
gaaattgttctatggtttg

SEQ ID NO: 1955 - DNA, 19 bp, Homo sapiens
aaaccatagaacaatttca

SEQ ID NO: 1956 - DNA, 19 bp, Homo sapiens
tgaaattgttctatggttt

SEQ ID NO: 1957 - DNA, 19 bp, Homo sapiens
aaccatagaacaatttcac

SEQ ID NO: 1958 - DNA, 19 bp, Homo sapiens
gtgaaattgttctatggtt

SEQ ID NO: 1959 - DNA, 19 bp, Homo sapiens
accatagaacaatttcact

SEQ ID NO: 1960 - DNA, 19 bp, Homo sapiens
agtgaaattgttctatggt

SEQ ID NO: 1961 - DNA, 19 bp, Homo sapiens
ccatagaacaatttcactg

SEQ ID NO: 1962 - DNA, 19 bp, Homo sapiens
cagtgaaattgttctatgg

SEQ ID NO: 1963 - DNA, 19 bp, Homo sapiens
catagaacaatttcactgc

SEQ ID NO: 1964 - DNA, 19 bp, Homo sapiens
gcagtgaaattgttctatg

SEQ ID NO: 1965 - DNA, 19 bp, Homo sapiens
atagaacaatttcactgca

SEQ ID NO: 1966 - DNA, 19 bp, Homo sapiens
tgcagtgaaattgttctat

SEQ ID NO: 1967 - DNA, 19 bp, Homo sapiens
tagaacaatttcactgcaa

SEQ ID NO: 1968 - DNA, 19 bp, Homo sapiens
ttgcagtgaaattgttcta

SEQ ID NO: 1969 - DNA, 19 bp, Homo sapiens
agaacaatttcactgcaaa

SEQ ID NO: 1970 - DNA, 19 bp, Homo sapiens
tttgcagtgaaattgttct

SEQ ID NO: 1971 - DNA, 19 bp, Homo sapiens
gaacaatttcactgcaaac

SEQ ID NO: 1972 - DNA, 19 bp, Homo sapiens
gtttgcagtgaaattgttc

SEQ ID NO: 1973 - DNA, 19 bp, Homo sapiens
aacaatttcactgcaaaca

SEQ ID NO: 1974 - DNA, 19 bp, Homo sapiens
tgtttgcagtgaaattgtt

SEQ ID NO: 1975 - DNA, 19 bp, Homo sapiens
acaatttcactgcaaacat

SEQ ID NO: 1976 - DNA, 19 bp, Homo sapiens
atgtttgcagtgaaattgt

SEQ ID NO: 1977 - DNA, 19 bp, Homo sapiens
caatttcactgcaaacatg

SEQ ID NO: 1978 - DNA, 19 bp, Homo sapiens
catgtttgcagtgaaattg

SEQ ID NO: 1979 - DNA, 19 bp, Homo sapiens
aatttcactgcaaacatgc

SEQ ID NO: 1980 - DNA, 19 bp, Homo sapiens
gcatgtttgcagtgaaatt

SEQ ID NO: 1981 - DNA, 19 bp, Homo sapiens
atttcactgcaaacatgca

SEQ ID NO: 1982 - DNA, 19 bp, Homo sapiens
tgcatgtttgcagtgaaat

SEQ ID NO: 1983 - DNA, 19 bp, Homo sapiens
tttcactgcaaacatgcat

SEQ ID NO: 1984 - DNA, 19 bp, Homo sapiens
atgcatgtttgcagtgaaa

SEQ ID NO: 1985 - DNA, 19 bp, Homo sapiens
ttcactgcaaacatgcatg

SEQ ID NO: 1986 - DNA, 19 bp, Homo sapiens
catgcatgtttgcagtgaa

SEQ ID NO: 1987 - DNA, 19 bp, Homo sapiens
tcactgcaaacatgcatga

SEQ ID NO: 1988 - DNA, 19 bp, Homo sapiens
tcatgcatgtttgcagtga

SEQ ID NO: 1989 - DNA, 19 bp, Homo sapiens
cactgcaaacatgcatgat

SEQ ID NO: 1990 - DNA, 19 bp, Homo sapiens
atcatgcatgtttgcagtg

SEQ ID NO: 1991 - DNA, 19 bp, Homo sapiens
actgcaaacatgcatgatt

SEQ ID NO: 1992 - DNA, 19 bp, Homo sapiens
aatcatgcatgtttgcagt

SEQ ID NO: 1993 - DNA, 19 bp, Homo sapiens
ctgcaaacatgcatgattc

SEQ ID NO: 1994 - DNA, 19 bp, Homo sapiens
gaatcatgcatgtttgcag

SEQ ID NO: 1995 - DNA, 19 bp, Homo sapiens
tgcaaacatgcatgattct

SEQ ID NO: 1996 - DNA, 19 bp, Homo sapiens
agaatcatgcatgtttgca

SEQ ID NO: 1997 - DNA, 19 bp, Homo sapiens
gcaaacatgcatgattctc

SEQ ID NO: 1998 - DNA, 19 bp, Homo sapiens
gagaatcatgcatgtttgc

SEQ ID NO: 1999 - DNA, 19 bp, Homo sapiens
caaacatgcatgattctcc

SEQ ID NO: 2000 - DNA, 19 bp, Homo sapiens
ggagaatcatgcatgtttg

SEQ ID NO: 2001 - DNA, 19 bp, Homo sapiens
aaacatgcatgattctcca

SEQ ID NO: 2002 - DNA, 19 bp, Homo sapiens
tggagaatcatgcatgttt

SEQ ID NO: 2003 - DNA, 19 bp, Homo sapiens
aacatgcatgattctccaa

SEQ ID NO: 2004 - DNA, 19 bp, Homo sapiens
ttggagaatcatgcatgtt

SEQ ID NO: 2005 - DNA, 19 bp, Homo sapiens
acatgcatgattctccaag

SEQ ID NO: 2006 - DNA, 19 bp, Homo sapiens
cttggagaatcatgcatgt

SEQ ID NO: 2007 - DNA, 19 bp, Homo sapiens
catgcatgattctccaaga

SEQ ID NO: 2008 - DNA, 19 bp, Homo sapiens
tcttggagaatcatgcatg

SEQ ID NO: 2009 - DNA, 19 bp, Homo sapiens
atgcatgattctccaagac

SEQ ID NO: 2010 - DNA, 19 bp, Homo sapiens
gtcttggagaatcatgcat

SEQ ID NO: 2011 - DNA, 19 bp, Homo sapiens
tgcatgattctccaagaca

SEQ ID NO: 2012 - DNA, 19 bp, Homo sapiens
tgtcttggagaatcatgca

SEQ ID NO: 2013 - DNA, 19 bp, Homo sapiens
gcatgattctccaagacaa

SEQ ID NO: 2014 - DNA, 19 bp, Homo sapiens
ttgtcttggagaatcatgc

SEQ ID NO: 2015 - DNA, 19 bp, Homo sapiens
catgattctccaagacaaa

SEQ ID NO: 2016 - DNA, 19 bp, Homo sapiens
tttgtcttggagaatcatg

SEQ ID NO: 2017 - DNA, 19 bp, Homo sapiens
atgattctccaagacaaaa

SEQ ID NO: 2018 - DNA, 19 bp, Homo sapiens
ttttgtcttggagaatcat

SEQ ID NO: 2019 - DNA, 19 bp, Homo sapiens
tgattctccaagacaaaag

SEQ ID NO: 2020 - DNA, 19 bp, Homo sapiens
cttttgtcttggagaatca

SEQ ID NO: 2021 - DNA, 19 bp, Homo sapiens
gattctccaagacaaaaga

SEQ ID NO: 2022 - DNA, 19 bp, Homo sapiens
tcttttgtcttggagaatc

SEQ ID NO: 2023 - DNA, 19 bp, Homo sapiens
attctccaagacaaaagaa

SEQ ID NO: 2024 - DNA, 19 bp, Homo sapiens
ttcttttgtcttggagaat

SEQ ID NO: 2025 - DNA, 19 bp, Homo sapiens
ttctccaagacaaaagaag

SEQ ID NO: 2026 - DNA, 19 bp, Homo sapiens
cttcttttgtcttggagaa

SEQ ID NO: 2027 - DNA, 19 bp, Homo sapiens
tctccaagacaaaagaaga

SEQ ID NO: 2028 - DNA, 19 bp, Homo sapiens
tcttcttttgtcttggaga

SEQ ID NO: 2029 - DNA, 19 bp, Homo sapiens
ctccaagacaaaagaagag

SEQ ID NO: 2030 - DNA, 19 bp, Homo sapiens
ctcttcttttgtcttggag

SEQ ID NO: 2031 - DNA, 19 bp, Homo sapiens
tccaagacaaaagaagaga

SEQ ID NO: 2032 - DNA, 19 bp, Homo sapiens
tctcttcttttgtcttgga

SEQ ID NO: 2033 - DNA, 19 bp, Homo sapiens
ccaagacaaaagaagagag

SEQ ID NO: 2034 - DNA, 19 bp, Homo sapiens
ctctcttcttttgtcttgg

SEQ ID NO: 2035 - DNA, 19 bp, Homo sapiens
caagacaaaagaagagaga

SEQ ID NO: 2036 - DNA, 19 bp, Homo sapiens
tctctcttcttttgtcttg

SEQ ID NO: 2037 - DNA, 19 bp, Homo sapiens
aagacaaaagaagagagat

SEQ ID NO: 2038 - DNA, 19 bp, Homo sapiens
atctctcttcttttgtctt

SEQ ID NO: 2039 - DNA, 19 bp, Homo sapiens
agacaaaagaagagagatc

SEQ ID NO: 2040 - DNA, 19 bp, Homo sapiens
gatctctcttcttttgtct

SEQ ID NO: 2041 - DNA, 19 bp, Homo sapiens
gacaaaagaagagagatcc

SEQ ID NO: 2042 - DNA, 19 bp, Homo sapiens
ggatctctcttcttttgtc

SEQ ID NO: 2043 - DNA, 19 bp, Homo sapiens
acaaaagaagagagatcct

SEQ ID NO: 2044 - DNA, 19 bp, Homo sapiens
aggatctctcttcttttgt

SEQ ID NO: 2045 - DNA, 19 bp, Homo sapiens
caaaagaagagagatccta

SEQ ID NO: 2046 - DNA, 19 bp, Homo sapiens
taggatctctcttcttttg

SEQ ID NO: 2047 - DNA, 19 bp, Homo sapiens
aaaagaagagagatcctaa

SEQ ID NO: 2048 - DNA, 19 bp, Homo sapiens
ttaggatctctcttctttt

SEQ ID NO: 2049 - DNA, 19 bp, Homo sapiens
aaagaagagagatcctaaa

SEQ ID NO: 2050 - DNA, 19 bp, Homo sapiens
tttaggatctctcttcttt

SEQ ID NO: 2051 - DNA, 19 bp, Homo sapiens
aagaagagagatcctaaag

SEQ ID NO: 2052 - DNA, 19 bp, Homo sapiens
ctttaggatctctcttctt

SEQ ID NO: 2053 - DNA, 19 bp, Homo sapiens
agaagagagatcctaaagg

SEQ ID NO: 2054 - DNA, 19 bp, Homo sapiens
cctttaggatctctcttct

SEQ ID NO: 2055 - DNA, 19 bp, Homo sapiens
gaagagagatcctaaaggc

SEQ ID NO: 2056 - DNA, 19 bp, Homo sapiens
gcctttaggatctctcttc

SEQ ID NO: 2057 - DNA, 19 bp, Homo sapiens
aagagagatcctaaaggca

SEQ ID NO: 2058 - DNA, 19 bp, Homo sapiens
tgcctttaggatctctctt

SEQ ID NO: 2059 - DNA, 19 bp, Homo sapiens
agagagatcctaaaggcaa

SEQ ID NO: 2060 - DNA, 19 bp, Homo sapiens
ttgcctttaggatctctct

SEQ ID NO: 2061 - DNA, 19 bp, Homo sapiens
gagagatcctaaaggcaat

SEQ ID NO: 2062 - DNA, 19 bp, Homo sapiens
attgcctttaggatctctc

SEQ ID NO: 2063 - DNA, 19 bp, Homo sapiens
agagatcctaaaggcaatt

SEQ ID NO: 2064 - DNA, 19 bp, Homo sapiens
aattgcctttaggatctct

SEQ ID NO: 2065 - DNA, 19 bp, Homo sapiens
gagatcctaaaggcaattc

SEQ ID NO: 2066 - DNA, 19 bp, Homo sapiens
gaattgcctttaggatctc

SEQ ID NO: 2067 - DNA, 19 bp, Homo sapiens
agatcctaaaggcaattca

SEQ ID NO: 2068 - DNA, 19 bp, Homo sapiens
tgaattgcctttaggatct

SEQ ID NO: 2069 - DNA, 19 bp, Homo sapiens
gatcctaaaggcaattcag

SEQ ID NO: 2070 - DNA, 19 bp, Homo sapiens
ctgaattgcctttaggatc

SEQ ID NO: 2071 - DNA, 19 bp, Homo sapiens
atcctaaaggcaattcaga

SEQ ID NO: 2072 - DNA, 19 bp, Homo sapiens
tctgaattgcctttaggat

SEQ ID NO: 2073 - DNA, 19 bp, Homo sapiens
tcctaaaggcaattcagat

SEQ ID NO: 2074 - DNA, 19 bp, Homo sapiens
atctgaattgcctttagga

SEQ ID NO: 2075 - DNA, 19 bp, Homo sapiens
cctaaaggcaattcagata

SEQ ID NO: 2076 - DNA, 19 bp, Homo sapiens
tatctgaattgcctttagg

SEQ ID NO: 2077 - DNA, 19 bp, Homo sapiens
ctaaaggcaattcagatat

SEQ ID NO: 2078 - DNA, 19 bp, Homo sapiens
atatctgaattgcctttag

SEQ ID NO: 2079 - DNA, 19 bp, Homo sapiens
taaaggcaattcagatatc

SEQ ID NO: 2080 - DNA, 19 bp, Homo sapiens
gatatctgaattgccttta

SEQ ID NO: 2081 - DNA, 19 bp, Homo sapiens
aaaggcaattcagatatcc

SEQ ID NO: 2082 - DNA, 19 bp, Homo sapiens
ggatatctgaattgccttt

SEQ ID NO: 2083 - DNA, 19 bp, Homo sapiens
aaggcaattcagatatccc

SEQ ID NO: 2084 - DNA, 19 bp, Homo sapiens
gggatatctgaattgcctt

SEQ ID NO: 2085 - DNA, 19 bp, Homo sapiens
aggcaattcagatatcccc

SEQ ID NO: 2086 - DNA, 19 bp, Homo sapiens
ggggatatctgaattgcct

SEQ ID NO: 2087 - DNA, 19 bp, Homo sapiens
ggcaattcagatatcccca

SEQ ID NO: 2088 - DNA, 19 bp, Homo sapiens
tggggatatctgaattgcc

SEQ ID NO: 2089 - DNA, 19 bp, Homo sapiens
gcaattcagatatccccaa

SEQ ID NO: 2090 - DNA, 19 bp, Homo sapiens
ttggggatatctgaattgc

SEQ ID NO: 2091 - DNA, 19 bp, Homo sapiens
caattcagatatccccaag

SEQ ID NO: 2092 - DNA, 19 bp, Homo sapiens
cttggggatatctgaattg

SEQ ID NO: 2093 - DNA, 19 bp, Homo sapiens
aattcagatatccccaagg

SEQ ID NO: 2094 - DNA, 19 bp, Homo sapiens
ccttggggatatctgaatt

SEQ ID NO: 2095 - DNA, 19 bp, Homo sapiens
attcagatatccccaaggc

SEQ ID NO: 2096 - DNA, 19 bp, Homo sapiens
gccttggggatatctgaat

SEQ ID NO: 2097 - DNA, 19 bp, Homo sapiens
ttcagatatccccaaggct

SEQ ID NO: 2098 - DNA, 19 bp, Homo sapiens
agccttggggatatctgaa

SEQ ID NO: 2099 - DNA, 19 bp, Homo sapiens
tcagatatccccaaggctg

SEQ ID NO: 2100 - DNA, 19 bp, Homo sapiens
cagccttggggatatctga

SEQ ID NO: 2101 - DNA, 19 bp, Homo sapiens
cagatatccccaaggctgc

SEQ ID NO: 2102 - DNA, 19 bp, Homo sapiens
gcagccttggggatatctg

SEQ ID NO: 2103 - DNA, 19 bp, Homo sapiens
agatatccccaaggctgcc

SEQ ID NO: 2104 - DNA, 19 bp, Homo sapiens
ggcagccttggggatatct

SEQ ID NO: 2105 - DNA, 19 bp, Homo sapiens
gatatccccaaggctgcct

SEQ ID NO: 2106 - DNA, 19 bp, Homo sapiens
aggcagccttggggatatc

SEQ ID NO: 2107 - DNA, 19 bp, Homo sapiens
atatccccaaggctgcctc

SEQ ID NO: 2108 - DNA, 19 bp, Homo sapiens
gaggcagccttggggatat

SEQ ID NO: 2109 - DNA, 19 bp, Homo sapiens
tatccccaaggctgcctct

SEQ ID NO: 2110 - DNA, 19 bp, Homo sapiens
agaggcagccttggggata

SEQ ID NO: 2111 - DNA, 19 bp, Homo sapiens
atccccaaggctgcctctc

SEQ ID NO: 2112 - DNA, 19 bp, Homo sapiens
gagaggcagccttggggat

SEQ ID NO: 2113 - DNA, 19 bp, Homo sapiens
tccccaaggctgcctctcc

SEQ ID NO: 2114 - DNA, 19 bp, Homo sapiens
ggagaggcagccttgggga

SEQ ID NO: 2115 - DNA, 19 bp, Homo sapiens
ccccaaggctgcctctccc

SEQ ID NO: 2116 - DNA, 19 bp, Homo sapiens
gggagaggcagccttgggg

SEQ ID NO: 2117 - DNA, 19 bp, Homo sapiens
cccaaggctgcctctccca

SEQ ID NO: 2118 - DNA, 19 bp, Homo sapiens
tgggagaggcagccttggg

SEQ ID NO: 2119 - DNA, 19 bp, Homo sapiens
ccaaggctgcctctcccac

SEQ ID NO: 2120 - DNA, 19 bp, Homo sapiens
gtgggagaggcagccttgg

SEQ ID NO: 2121 - DNA, 19 bp, Homo sapiens
caaggctgcctctcccacc

SEQ ID NO: 2122 - DNA, 19 bp, Homo sapiens
ggtgggagaggcagccttg

SEQ ID NO: 2123 - DNA, 19 bp, Homo sapiens
aaggctgcctctcccacca

SEQ ID NO: 2124 - DNA, 19 bp, Homo sapiens
tggtgggagaggcagcctt

SEQ ID NO: 2125 - DNA, 19 bp, Homo sapiens
aggctgcctctcccaccac

SEQ ID NO: 2126 - DNA, 19 bp, Homo sapiens
gtggtgggagaggcagcct

SEQ ID NO: 2127 - DNA, 19 bp, Homo sapiens
ggctgcctctcccaccaca

SEQ ID NO: 2128 - DNA, 19 bp, Homo sapiens
tgtggtgggagaggcagcc

SEQ ID NO: 2129 - DNA, 19 bp, Homo sapiens
gctgcctctcccaccacaa

SEQ ID NO: 2130 - DNA, 19 bp, Homo sapiens
ttgtggtgggagaggcagc

SEQ ID NO: 2131 - DNA, 19 bp, Homo sapiens
ctgcctctcccaccacaag

SEQ ID NO: 2132 - DNA, 19 bp, Homo sapiens
cttgtggtgggagaggcag

SEQ ID NO: 2133 - DNA, 19 bp, Homo sapiens
tgcctctcccaccacaagc

SEQ ID NO: 2134 - DNA, 19 bp, Homo sapiens
gcttgtggtgggagaggca

SEQ ID NO: 2135 - DNA, 19 bp, Homo sapiens
gcctctcccaccacaagcc

SEQ ID NO: 2136 - DNA, 19 bp, Homo sapiens
ggcttgtggtgggagaggc

SEQ ID NO: 2137 - DNA, 19 bp, Homo sapiens
cctctcccaccacaagccc

SEQ ID NO: 2138 - DNA, 19 bp, Homo sapiens
gggcttgtggtgggagagg

SEQ ID NO: 2139 - DNA, 19 bp, Homo sapiens
ctctcccaccacaagccca

SEQ ID NO: 2140 - DNA, 19 bp, Homo sapiens
tgggcttgtggtgggagag

SEQ ID NO: 2141 - DNA, 19 bp, Homo sapiens
tctcccaccacaagcccag

SEQ ID NO: 2142 - DNA, 19 bp, Homo sapiens
ctgggcttgtggtgggaga

SEQ ID NO: 2143 - DNA, 19 bp, Homo sapiens
ctcccaccacaagcccaga

SEQ ID NO: 2144 - DNA, 19 bp, Homo sapiens
tctgggcttgtggtgggag

SEQ ID NO: 2145 - DNA, 19 bp, Homo sapiens
tcccaccacaagcccagag

SEQ ID NO: 2146 - DNA, 19 bp, Homo sapiens
ctctgggcttgtggtggga

SEQ ID NO: 2147 - DNA, 19 bp, Homo sapiens
cccaccacaagcccagagt

SEQ ID NO: 2148 - DNA, 19 bp, Homo sapiens
actctgggcttgtggtggg

SEQ ID NO: 2149 - DNA, 19 bp, Homo sapiens
ccaccacaagcccagagtg

SEQ ID NO: 2150 - DNA, 19 bp, Homo sapiens
cactctgggcttgtggtgg

SEQ ID NO: 2151 - DNA, 19 bp, Homo sapiens
caccacaagcccagagtgg

SEQ ID NO: 2152 - DNA, 19 bp, Homo sapiens
ccactctgggcttgtggtg

SEQ ID NO: 2153 - DNA, 19 bp, Homo sapiens
accacaagcccagagtgga

SEQ ID NO: 2154 - DNA, 19 bp, Homo sapiens
tccactctgggcttgtggt

SEQ ID NO: 2155 - DNA, 19 bp, Homo sapiens
ccacaagcccagagtggat

SEQ ID NO: 2156 - DNA, 19 bp, Homo sapiens
atccactctgggcttgtgg

SEQ ID NO: 2157 - DNA, 19 bp, Homo sapiens
cacaagcccagagtggatg

SEQ ID NO: 2158 - DNA, 19 bp, Homo sapiens
catccactctgggcttgtg

SEQ ID NO: 2159 - DNA, 19 bp, Homo sapiens
acaagcccagagtggatgg

SEQ ID NO: 2160 - DNA, 19 bp, Homo sapiens
ccatccactctgggcttgt

SEQ ID NO: 2161 - DNA, 19 bp, Homo sapiens
caagcccagagtggatggg

SEQ ID NO: 2162 - DNA, 19 bp, Homo sapiens
cccatccactctgggcttg

SEQ ID NO: 2163 - DNA, 19 bp, Homo sapiens
aagcccagagtggatgggc

SEQ ID NO: 2164 - DNA, 19 bp, Homo sapiens
gcccatccactctgggctt

SEQ ID NO: 2165 - DNA, 19 bp, Homo sapiens
agcccagagtggatgggct

SEQ ID NO: 2166 - DNA, 19 bp, Homo sapiens
agcccatccactctgggct

SEQ ID NO: 2167 - DNA, 19 bp, Homo sapiens
gcccagagtggatgggctg

SEQ ID NO: 2168 - DNA, 19 bp, Homo sapiens
cagcccatccactctgggc

SEQ ID NO: 2169 - DNA, 19 bp, Homo sapiens
cccagagtggatgggctgg

SEQ ID NO: 2170 - DNA, 19 bp, Homo sapiens
ccagcccatccactctggg

SEQ ID NO: 2171 - DNA, 19 bp, Homo sapiens
ccagagtggatgggctggg

SEQ ID NO: 2172 - DNA, 19 bp, Homo sapiens
cccagcccatccactctgg

SEQ ID NO: 2173 - DNA, 19 bp, Homo sapiens
cagagtggatgggctgggg

SEQ ID NO: 2174 - DNA, 19 bp, Homo sapiens
ccccagcccatccactctg

SEQ ID NO: 2175 - DNA, 19 bp, Homo sapiens
agagtggatgggctggggg

SEQ ID NO: 2176 - DNA, 19 bp, Homo sapiens
cccccagcccatccactct

SEQ ID NO: 2177 - DNA, 19 bp, Homo sapiens
gagtggatgggctggggga

SEQ ID NO: 2178 - DNA, 19 bp, Homo sapiens
tcccccagcccatccactc

SEQ ID NO: 2179 - DNA, 19 bp, Homo sapiens
agtggatgggctgggggag

SEQ ID NO: 2180 - DNA, 19 bp, Homo sapiens
ctcccccagcccatccact

SEQ ID NO: 2181 - DNA, 19 bp, Homo sapiens
gtggatgggctgggggagg

SEQ ID NO: 2182 - DNA, 19 bp, Homo sapiens
cctcccccagcccatccac

SEQ ID NO: 2183 - DNA, 19 bp, Homo sapiens
tggatgggctgggggaggg

SEQ ID NO: 2184 - DNA, 19 bp, Homo sapiens
ccctcccccagcccatcca

SEQ ID NO: 2185 - DNA, 19 bp, Homo sapiens
ggatgggctgggggagggg

SEQ ID NO: 2186 - DNA, 19 bp, Homo sapiens
cccctcccccagcccatcc

SEQ ID NO: 2187 - DNA, 19 bp, Homo sapiens
gatgggctgggggaggggt

SEQ ID NO: 2188 - DNA, 19 bp, Homo sapiens
acccctcccccagcccatc

SEQ ID NO: 2189 - DNA, 19 bp, Homo sapiens
atgggctgggggaggggtg

SEQ ID NO: 2190 - DNA, 19 bp, Homo sapiens
cacccctcccccagcccat

SEQ ID NO: 2191 - DNA, 19 bp, Homo sapiens
tgggctgggggaggggtgc

SEQ ID NO: 2192 - DNA, 19 bp, Homo sapiens
gcacccctcccccagccca

SEQ ID NO: 2193 - DNA, 19 bp, Homo sapiens
gggctgggggaggggtgct

SEQ ID NO: 2194 - DNA, 19 bp, Homo sapiens
agcacccctcccccagccc

SEQ ID NO: 2195 - DNA, 19 bp, Homo sapiens
ggctgggggaggggtgctg

SEQ ID NO: 2196 - DNA, 19 bp, Homo sapiens
cagcacccctcccccagcc

SEQ ID NO: 2197 - DNA, 19 bp, Homo sapiens
gctgggggaggggtgctgt

SEQ ID NO: 2198 - DNA, 19 bp, Homo sapiens
acagcacccctcccccagc

SEQ ID NO: 2199 - DNA, 19 bp, Homo sapiens
ctgggggaggggtgctgtt

SEQ ID NO: 2200 - DNA, 19 bp, Homo sapiens
aacagcacccctcccccag

SEQ ID NO: 2201 - DNA, 19 bp, Homo sapiens
tgggggaggggtgctgttt

SEQ ID NO: 2202 - DNA, 19 bp, Homo sapiens
aaacagcacccctccccca

SEQ ID NO: 2203 - DNA, 19 bp, Homo sapiens
gggggaggggtgctgtttt

SEQ ID NO: 2204 - DNA, 19 bp, Homo sapiens
aaaacagcacccctccccc

SEQ ID NO: 2205 - DNA, 19 bp, Homo sapiens
ggggaggggtgctgtttta

SEQ ID NO: 2206 - DNA, 19 bp, Homo sapiens
taaaacagcacccctcccc

SEQ ID NO: 2207 - DNA, 19 bp, Homo sapiens
gggaggggtgctgttttaa

SEQ ID NO: 2208 - DNA, 19 bp, Homo sapiens
ttaaaacagcacccctccc

SEQ ID NO: 2209 - DNA, 19 bp, Homo sapiens
ggaggggtgctgttttaat

SEQ ID NO: 2210 - DNA, 19 bp, Homo sapiens
attaaaacagcacccctcc

SEQ ID NO: 2211 - DNA, 19 bp, Homo sapiens
gaggggtgctgttttaatt

SEQ ID NO: 2212 - DNA, 19 bp, Homo sapiens
aattaaaacagcacccctc

SEQ ID NO: 2213 - DNA, 19 bp, Homo sapiens
aggggtgctgttttaattt

SEQ ID NO: 2214 - DNA, 19 bp, Homo sapiens
aaattaaaacagcacccct

SEQ ID NO: 2215 - DNA, 19 bp, Homo sapiens
ggggtgctgttttaatttc

SEQ ID NO: 2216 - DNA, 19 bp, Homo sapiens
gaaattaaaacagcacccc

SEQ ID NO: 2217 - DNA, 19 bp, Homo sapiens
gggtgctgttttaatttct

SEQ ID NO: 2218 - DNA, 19 bp, Homo sapiens
agaaattaaaacagcaccc

SEQ ID NO: 2219 - DNA, 19 bp, Homo sapiens
ggtgctgttttaatttcta

SEQ ID NO: 2220 - DNA, 19 bp, Homo sapiens
tagaaattaaaacagcacc

SEQ ID NO: 2221 - DNA, 19 bp, Homo sapiens
gtgctgttttaatttctaa

SEQ ID NO: 2222 - DNA, 19 bp, Homo sapiens
ttagaaattaaaacagcac

SEQ ID NO: 2223 - DNA, 19 bp, Homo sapiens
tgctgttttaatttctaaa

SEQ ID NO: 2224 - DNA, 19 bp, Homo sapiens
tttagaaattaaaacagca

SEQ ID NO: 2225 - DNA, 19 bp, Homo sapiens
gctgttttaatttctaaag

SEQ ID NO: 2226 - DNA, 19 bp, Homo sapiens
ctttagaaattaaaacagc

SEQ ID NO: 2227 - DNA, 19 bp, Homo sapiens
ctgttttaatttctaaagg

SEQ ID NO: 2228 - DNA, 19 bp, Homo sapiens
cctttagaaattaaaacag

SEQ ID NO: 2229 - DNA, 19 bp, Homo sapiens
tgttttaatttctaaaggt

SEQ ID NO: 2230 - DNA, 19 bp, Homo sapiens
acctttagaaattaaaaca

SEQ ID NO: 2231 - DNA, 19 bp, Homo sapiens
gttttaatttctaaaggta

SEQ ID NO: 2232 - DNA, 19 bp, Homo sapiens
tacctttagaaattaaaac

SEQ ID NO: 2233 - DNA, 19 bp, Homo sapiens
ttttaatttctaaaggtag

SEQ ID NO: 2234 - DNA, 19 bp, Homo sapiens
ctacctttagaaattaaaa

SEQ ID NO: 2235 - DNA, 19 bp, Homo sapiens
tttaatttctaaaggtagg

SEQ ID NO: 2236 - DNA, 19 bp, Homo sapiens
cctacctttagaaattaaa

SEQ ID NO: 2237 - DNA, 19 bp, Homo sapiens
ttaatttctaaaggtagga

SEQ ID NO: 2238 - DNA, 19 bp, Homo sapiens
tcctacctttagaaattaa

SEQ ID NO: 2239 - DNA, 19 bp, Homo sapiens
taatttctaaaggtaggac

SEQ ID NO: 2240 - DNA, 19 bp, Homo sapiens
gtcctacctttagaaatta

SEQ ID NO: 2241 - DNA, 19 bp, Homo sapiens
aatttctaaaggtaggacc

SEQ ID NO: 2242 - DNA, 19 bp, Homo sapiens
ggtcctacctttagaaatt

SEQ ID NO: 2243 - DNA, 19 bp, Homo sapiens
atttctaaaggtaggacca

SEQ ID NO: 2244 - DNA, 19 bp, Homo sapiens
tggtcctacctttagaaat

SEQ ID NO: 2245 - DNA, 19 bp, Homo sapiens
tttctaaaggtaggaccaa

SEQ ID NO: 2246 - DNA, 19 bp, Homo sapiens
ttggtcctacctttagaaa

SEQ ID NO: 2247 - DNA, 19 bp, Homo sapiens
ttctaaaggtaggaccaac

SEQ ID NO: 2248 - DNA, 19 bp, Homo sapiens
gttggtcctacctttagaa

SEQ ID NO: 2249 - DNA, 19 bp, Homo sapiens
tctaaaggtaggaccaaca

SEQ ID NO: 2250 - DNA, 19 bp, Homo sapiens
tgttggtcctacctttaga

SEQ ID NO: 2251 - DNA, 19 bp, Homo sapiens
ctaaaggtaggaccaacac

SEQ ID NO: 2252 - DNA, 19 bp, Homo sapiens
gtgttggtcctacctttag

SEQ ID NO: 2253 - DNA, 19 bp, Homo sapiens
taaaggtaggaccaacacc

SEQ ID NO: 2254 - DNA, 19 bp, Homo sapiens
ggtgttggtcctaccttta

SEQ ID NO: 2255 - DNA, 19 bp, Homo sapiens
aaaggtaggaccaacaccc

SEQ ID NO: 2256 - DNA, 19 bp, Homo sapiens
gggtgttggtcctaccttt

SEQ ID NO: 2257 - DNA, 19 bp, Homo sapiens
aaggtaggaccaacaccca

SEQ ID NO: 2258 - DNA, 19 bp, Homo sapiens
tgggtgttggtcctacctt

SEQ ID NO: 2259 - DNA, 19 bp, Homo sapiens
aggtaggaccaacacccag

SEQ ID NO: 2260 - DNA, 19 bp, Homo sapiens
ctgggtgttggtcctacct

SEQ ID NO: 2261 - DNA, 19 bp, Homo sapiens
ggtaggaccaacacccagg

SEQ ID NO: 2262 - DNA, 19 bp, Homo sapiens
cctgggtgttggtcctacc

SEQ ID NO: 2263 - DNA, 19 bp, Homo sapiens
gtaggaccaacacccaggg

SEQ ID NO: 2264 - DNA, 19 bp, Homo sapiens
ccctgggtgttggtcctac

SEQ ID NO: 2265 - DNA, 19 bp, Homo sapiens
taggaccaacacccagggg

SEQ ID NO: 2266 - DNA, 19 bp, Homo sapiens
cccctgggtgttggtccta

SEQ ID NO: 2267 - DNA, 19 bp, Homo sapiens
aggaccaacacccagggga

SEQ ID NO: 2268 - DNA, 19 bp, Homo sapiens
tcccctgggtgttggtcct

SEQ ID NO: 2269 - DNA, 19 bp, Homo sapiens
ggaccaacacccaggggat

SEQ ID NO: 2270 - DNA, 19 bp, Homo sapiens
atcccctgggtgttggtcc

SEQ ID NO: 2271 - DNA, 19 bp, Homo sapiens
gaccaacacccaggggatc

SEQ ID NO: 2272 - DNA, 19 bp, Homo sapiens
gatcccctgggtgttggtc

SEQ ID NO: 2273 - DNA, 19 bp, Homo sapiens
accaacacccaggggatca

SEQ ID NO: 2274 - DNA, 19 bp, Homo sapiens
tgatcccctgggtgttggt

SEQ ID NO: 2275 - DNA, 19 bp, Homo sapiens
ccaacacccaggggatcag

SEQ ID NO: 2276 - DNA, 19 bp, Homo sapiens
ctgatcccctgggtgttgg

SEQ ID NO: 2277 - DNA, 19 bp, Homo sapiens
caacacccaggggatcagt

SEQ ID NO: 2278 - DNA, 19 bp, Homo sapiens
actgatcccctgggtgttg

SEQ ID NO: 2279 - DNA, 19 bp, Homo sapiens
aacacccaggggatcagtg

SEQ ID NO: 2280 - DNA, 19 bp, Homo sapiens
cactgatcccctgggtgtt

SEQ ID NO: 2281 - DNA, 19 bp, Homo sapiens
acacccaggggatcagtga

SEQ ID NO: 2282 - DNA, 19 bp, Homo sapiens
tcactgatcccctgggtgt

SEQ ID NO: 2283 - DNA, 19 bp, Homo sapiens
cacccaggggatcagtgaa

SEQ ID NO: 2284 - DNA, 19 bp, Homo sapiens
ttcactgatcccctgggtg

SEQ ID NO: 2285 - DNA, 19 bp, Homo sapiens
acccaggggatcagtgaag

SEQ ID NO: 2286 - DNA, 19 bp, Homo sapiens
cttcactgatcccctgggt

SEQ ID NO: 2287 - DNA, 19 bp, Homo sapiens
cccaggggatcagtgaagg

SEQ ID NO: 2288 - DNA, 19 bp, Homo sapiens
ccttcactgatcccctggg

SEQ ID NO: 2289 - DNA, 19 bp, Homo sapiens
ccaggggatcagtgaagga

SEQ ID NO: 2290 - DNA, 19 bp, Homo sapiens
tccttcactgatcccctgg

SEQ ID NO: 2291 - DNA, 19 bp, Homo sapiens
caggggatcagtgaaggaa

SEQ ID NO: 2292 - DNA, 19 bp, Homo sapiens
ttccttcactgatcccctg

SEQ ID NO: 2293 - DNA, 19 bp, Homo sapiens
aggggatcagtgaaggaag

SEQ ID NO: 2294 - DNA, 19 bp, Homo sapiens
cttccttcactgatcccct

SEQ ID NO: 2295 - DNA, 19 bp, Homo sapiens
ggggatcagtgaaggaaga

SEQ ID NO: 2296 - DNA, 19 bp, Homo sapiens
tcttccttcactgatcccc

SEQ ID NO: 2297 - DNA, 19 bp, Homo sapiens
gggatcagtgaaggaagag

SEQ ID NO: 2298 - DNA, 19 bp, Homo sapiens
ctcttccttcactgatccc

SEQ ID NO: 2299 - DNA, 19 bp, Homo sapiens
ggatcagtgaaggaagaga

SEQ ID NO: 2300 - DNA, 19 bp, Homo sapiens
tctcttccttcactgatcc

SEQ ID NO: 2301 - DNA, 19 bp, Homo sapiens
gatcagtgaaggaagagaa

SEQ ID NO: 2302 - DNA, 19 bp, Homo sapiens
ttctcttccttcactgatc

SEQ ID NO: 2303 - DNA, 19 bp, Homo sapiens
atcagtgaaggaagagaag

SEQ ID NO: 2304 - DNA, 19 bp, Homo sapiens
cttctcttccttcactgat

SEQ ID NO: 2305 - DNA, 19 bp, Homo sapiens
tcagtgaaggaagagaagg

SEQ ID NO: 2306 - DNA, 19 bp, Homo sapiens
ccttctcttccttcactga

SEQ ID NO: 2307 - DNA, 19 bp, Homo sapiens
cagtgaaggaagagaaggc

SEQ ID NO: 2308 - DNA, 19 bp, Homo sapiens
gccttctcttccttcactg

SEQ ID NO: 2309 - DNA, 19 bp, Homo sapiens
agtgaaggaagagaaggcc

SEQ ID NO: 2310 - DNA, 19 bp, Homo sapiens
ggccttctcttccttcact

SEQ ID NO: 2311 - DNA, 19 bp, Homo sapiens
gtgaaggaagagaaggcca

SEQ ID NO: 2312 - DNA, 19 bp, Homo sapiens
tggccttctcttccttcac

SEQ ID NO: 2313 - DNA, 19 bp, Homo sapiens
tgaaggaagagaaggccag

SEQ ID NO: 2314 - DNA, 19 bp, Homo sapiens
ctggccttctcttccttca

SEQ ID NO: 2315 - DNA, 19 bp, Homo sapiens
gaaggaagagaaggccagc

SEQ ID NO: 2316 - DNA, 19 bp, Homo sapiens
gctggccttctcttccttc

SEQ ID NO: 2317 - DNA, 19 bp, Homo sapiens
aaggaagagaaggccagca

SEQ ID NO: 2318 - DNA, 19 bp, Homo sapiens
tgctggccttctcttcctt

SEQ ID NO: 2319 - DNA, 19 bp, Homo sapiens
aggaagagaaggccagcag

SEQ ID NO: 2320 - DNA, 19 bp, Homo sapiens
ctgctggccttctcttcct

SEQ ID NO: 2321 - DNA, 19 bp, Homo sapiens
ggaagagaaggccagcaga

SEQ ID NO: 2322 - DNA, 19 bp, Homo sapiens
tctgctggccttctcttcc

SEQ ID NO: 2323 - DNA, 19 bp, Homo sapiens
gaagagaaggccagcagat

SEQ ID NO: 2324 - DNA, 19 bp, Homo sapiens
atctgctggccttctcttc

SEQ ID NO: 2325 - DNA, 19 bp, Homo sapiens
aagagaaggccagcagatc

SEQ ID NO: 2326 - DNA, 19 bp, Homo sapiens
gatctgctggccttctctt

SEQ ID NO: 2327 - DNA, 19 bp, Homo sapiens
agagaaggccagcagatca

SEQ ID NO: 2328 - DNA, 19 bp, Homo sapiens
tgatctgctggccttctct

SEQ ID NO: 2329 - DNA, 19 bp, Homo sapiens
gagaaggccagcagatcac

SEQ ID NO: 2330 - DNA, 19 bp, Homo sapiens
gtgatctgctggccttctc

SEQ ID NO: 2331 - DNA, 19 bp, Homo sapiens
agaaggccagcagatcact

SEQ ID NO: 2332 - DNA, 19 bp, Homo sapiens
agtgatctgctggccttct

SEQ ID NO: 2333 - DNA, 19 bp, Homo sapiens
gaaggccagcagatcactg

SEQ ID NO: 2334 - DNA, 19 bp, Homo sapiens
cagtgatctgctggccttc

SEQ ID NO: 2335 - DNA, 19 bp, Homo sapiens
aaggccagcagatcactga

SEQ ID NO: 2336 - DNA, 19 bp, Homo sapiens
tcagtgatctgctggcctt

SEQ ID NO: 2337 - DNA, 19 bp, Homo sapiens
aggccagcagatcactgag

SEQ ID NO: 2338 - DNA, 19 bp, Homo sapiens
ctcagtgatctgctggcct

SEQ ID NO: 2339 - DNA, 19 bp, Homo sapiens
ggccagcagatcactgaga

SEQ ID NO: 2340 - DNA, 19 bp, Homo sapiens
tctcagtgatctgctggcc

SEQ ID NO: 2341 - DNA, 19 bp, Homo sapiens
gccagcagatcactgagag

SEQ ID NO: 2342 - DNA, 19 bp, Homo sapiens
ctctcagtgatctgctggc

SEQ ID NO: 2343 - DNA, 19 bp, Homo sapiens
ccagcagatcactgagagt

SEQ ID NO: 2344 - DNA, 19 bp, Homo sapiens
actctcagtgatctgctgg

SEQ ID NO: 2345 - DNA, 19 bp, Homo sapiens
cagcagatcactgagagtg

SEQ ID NO: 2346 - DNA, 19 bp, Homo sapiens
cactctcagtgatctgctg

SEQ ID NO: 2347 - DNA, 19 bp, Homo sapiens
agcagatcactgagagtgc

SEQ ID NO: 2348 - DNA, 19 bp, Homo sapiens
gcactctcagtgatctgct

SEQ ID NO: 2349 - DNA, 19 bp, Homo sapiens
gcagatcactgagagtgca

SEQ ID NO: 2350 - DNA, 19 bp, Homo sapiens
tgcactctcagtgatctgc

SEQ ID NO: 2351 - DNA, 19 bp, Homo sapiens
cagatcactgagagtgcaa

SEQ ID NO: 2352 - DNA, 19 bp, Homo sapiens
ttgcactctcagtgatctg

SEQ ID NO: 2353 - DNA, 19 bp, Homo sapiens
agatcactgagagtgcaac

SEQ ID NO: 2354 - DNA, 19 bp, Homo sapiens
gttgcactctcagtgatct

SEQ ID NO: 2355 - DNA, 19 bp, Homo sapiens
gatcactgagagtgcaacc

SEQ ID NO: 2356 - DNA, 19 bp, Homo sapiens
ggttgcactctcagtgatc

SEQ ID NO: 2357 - DNA, 19 bp, Homo sapiens
atcactgagagtgcaaccc

SEQ ID NO: 2358 - DNA, 19 bp, Homo sapiens
gggttgcactctcagtgat

SEQ ID NO: 2359 - DNA, 19 bp, Homo sapiens
tcactgagagtgcaacccc

SEQ ID NO: 2360 - DNA, 19 bp, Homo sapiens
ggggttgcactctcagtga

SEQ ID NO: 2361 - DNA, 19 bp, Homo sapiens
cactgagagtgcaacccca

SEQ ID NO: 2362 - DNA, 19 bp, Homo sapiens
tggggttgcactctcagtg

SEQ ID NO: 2363 - DNA, 19 bp, Homo sapiens
actgagagtgcaaccccac

SEQ ID NO: 2364 - DNA, 19 bp, Homo sapiens
gtggggttgcactctcagt

SEQ ID NO: 2365 - DNA, 19 bp, Homo sapiens
ctgagagtgcaaccccacc

SEQ ID NO: 2366 - DNA, 19 bp, Homo sapiens
ggtggggttgcactctcag

SEQ ID NO: 2367 - DNA, 19 bp, Homo sapiens
tgagagtgcaaccccaccc

SEQ ID NO: 2368 - DNA, 19 bp, Homo sapiens
gggtggggttgcactctca

SEQ ID NO: 2369 - DNA, 19 bp, Homo sapiens
gagagtgcaaccccaccct

SEQ ID NO: 2370 - DNA, 19 bp, Homo sapiens
agggtggggttgcactctc

SEQ ID NO: 2371 - DNA, 19 bp, Homo sapiens
agagtgcaaccccaccctc

SEQ ID NO: 2372 - DNA, 19 bp, Homo sapiens
gagggtggggttgcactct

SEQ ID NO: 2373 - DNA, 19 bp, Homo sapiens
gagtgcaaccccaccctcc

SEQ ID NO: 2374 - DNA, 19 bp, Homo sapiens
ggagggtggggttgcactc

SEQ ID NO: 2375 - DNA, 19 bp, Homo sapiens
agtgcaaccccaccctcca

SEQ ID NO: 2376 - DNA, 19 bp, Homo sapiens
tggagggtggggttgcact

SEQ ID NO: 2377 - DNA, 19 bp, Homo sapiens
gtgcaaccccaccctccac

SEQ ID NO: 2378 - DNA, 19 bp, Homo sapiens
gtggagggtggggttgcac

SEQ ID NO: 2379 - DNA, 19 bp, Homo sapiens
tgcaaccccaccctccaca

SEQ ID NO: 2380 - DNA, 19 bp, Homo sapiens
tgtggagggtggggttgca

SEQ ID NO: 2381 - DNA, 19 bp, Homo sapiens
gcaaccccaccctccacag

SEQ ID NO: 2382 - DNA, 19 bp, Homo sapiens
ctgtggagggtggggttgc

SEQ ID NO: 2383 - DNA, 19 bp, Homo sapiens
caaccccaccctccacagg

SEQ ID NO: 2384 - DNA, 19 bp, Homo sapiens
cctgtggagggtggggttg

SEQ ID NO: 2385 - DNA, 19 bp, Homo sapiens
aaccccaccctccacagga

SEQ ID NO: 2386 - DNA, 19 bp, Homo sapiens
tcctgtggagggtggggtt

SEQ ID NO: 2387 - DNA, 19 bp, Homo sapiens
accccaccctccacaggaa

SEQ ID NO: 2388 - DNA, 19 bp, Homo sapiens
ttcctgtggagggtggggt

SEQ ID NO: 2389 - DNA, 19 bp, Homo sapiens
ccccaccctccacaggaaa

SEQ ID NO: 2390 - DNA, 19 bp, Homo sapiens
tttcctgtggagggtgggg

SEQ ID NO: 2391 - DNA, 19 bp, Homo sapiens
cccaccctccacaggaaat

SEQ ID NO: 2392 - DNA, 19 bp, Homo sapiens
atttcctgtggagggtggg

SEQ ID NO: 2393 - DNA, 19 bp, Homo sapiens
ccaccctccacaggaaatt

SEQ ID NO: 2394 - DNA, 19 bp, Homo sapiens
aatttcctgtggagggtgg

SEQ ID NO: 2395 - DNA, 19 bp, Homo sapiens
caccctccacaggaaattg

SEQ ID NO: 2396 - DNA, 19 bp, Homo sapiens
caatttcctgtggagggtg

SEQ ID NO: 2397 - DNA, 19 bp, Homo sapiens
accctccacaggaaattgc

SEQ ID NO: 2398 - DNA, 19 bp, Homo sapiens
gcaatttcctgtggagggt

SEQ ID NO: 2399 - DNA, 19 bp, Homo sapiens
ccctccacaggaaattgcc

SEQ ID NO: 2400 - DNA, 19 bp, Homo sapiens
ggcaatttcctgtggaggg

SEQ ID NO: 2401 - DNA, 19 bp, Homo sapiens
cctccacaggaaattgcct

SEQ ID NO: 2402 - DNA, 19 bp, Homo sapiens
aggcaatttcctgtggagg

SEQ ID NO: 2403 - DNA, 19 bp, Homo sapiens
ctccacaggaaattgcctc

SEQ ID NO: 2404 - DNA, 19 bp, Homo sapiens
gaggcaatttcctgtggag

SEQ ID NO: 2405 - DNA, 19 bp, Homo sapiens
tccacaggaaattgcctca

SEQ ID NO: 2406 - DNA, 19 bp, Homo sapiens
tgaggcaatttcctgtgga

SEQ ID NO: 2407 - DNA, 19 bp, Homo sapiens
ccacaggaaattgcctcat

SEQ ID NO: 2408 - DNA, 19 bp, Homo sapiens
atgaggcaatttcctgtgg

SEQ ID NO: 2409 - DNA, 19 bp, Homo sapiens
cacaggaaattgcctcatg

SEQ ID NO: 2410 - DNA, 19 bp, Homo sapiens
catgaggcaatttcctgtg

SEQ ID NO: 2411 - DNA, 19 bp, Homo sapiens
acaggaaattgcctcatgg

SEQ ID NO: 2412 - DNA, 19 bp, Homo sapiens
ccatgaggcaatttcctgt

SEQ ID NO: 2413 - DNA, 19 bp, Homo sapiens
caggaaattgcctcatggg

SEQ ID NO: 2414 - DNA, 19 bp, Homo sapiens
cccatgaggcaatttcctg

SEQ ID NO: 2415 - DNA, 19 bp, Homo sapiens
aggaaattgcctcatgggc

SEQ ID NO: 2416 - DNA, 19 bp, Homo sapiens
gcccatgaggcaatttcct

SEQ ID NO: 2417 - DNA, 19 bp, Homo sapiens
ggaaattgcctcatgggca

SEQ ID NO: 2418 - DNA, 19 bp, Homo sapiens
tgcccatgaggcaatttcc

SEQ ID NO: 2419 - DNA, 19 bp, Homo sapiens
gaaattgcctcatgggcag

SEQ ID NO: 2420 - DNA, 19 bp, Homo sapiens
ctgcccatgaggcaatttc

SEQ ID NO: 2421 - DNA, 19 bp, Homo sapiens
aaattgcctcatgggcagg

SEQ ID NO: 2422 - DNA, 19 bp, Homo sapiens
cctgcccatgaggcaattt

SEQ ID NO: 2423 - DNA, 19 bp, Homo sapiens
aattgcctcatgggcaggg

SEQ ID NO: 2424 - DNA, 19 bp, Homo sapiens
ccctgcccatgaggcaatt

SEQ ID NO: 2425 - DNA, 19 bp, Homo sapiens
attgcctcatgggcagggc

SEQ ID NO: 2426 - DNA, 19 bp, Homo sapiens
gccctgcccatgaggcaat

SEQ ID NO: 2427 - DNA, 19 bp, Homo sapiens
ttgcctcatgggcagggcc

SEQ ID NO: 2428 - DNA, 19 bp, Homo sapiens
ggccctgcccatgaggcaa

SEQ ID NO: 2429 - DNA, 19 bp, Homo sapiens
tgcctcatgggcagggcca

SEQ ID NO: 2430 - DNA, 19 bp, Homo sapiens
tggccctgcccatgaggca

SEQ ID NO: 2431 - DNA, 19 bp, Homo sapiens
gcctcatgggcagggccac

SEQ ID NO: 2432 - DNA, 19 bp, Homo sapiens
gtggccctgcccatgaggc

SEQ ID NO: 2433 - DNA, 19 bp, Homo sapiens
cctcatgggcagggccaca

SEQ ID NO: 2434 - DNA, 19 bp, Homo sapiens
tgtggccctgcccatgagg

SEQ ID NO: 2435 - DNA, 19 bp, Homo sapiens
ctcatgggcagggccacag

SEQ ID NO: 2436 - DNA, 19 bp, Homo sapiens
ctgtggccctgcccatgag

SEQ ID NO: 2437 - DNA, 19 bp, Homo sapiens
tcatgggcagggccacagc

SEQ ID NO: 2438 - DNA, 19 bp, Homo sapiens
gctgtggccctgcccatga

SEQ ID NO: 2439 - DNA, 19 bp, Homo sapiens
catgggcagggccacagca

SEQ ID NO: 2440 - DNA, 19 bp, Homo sapiens
tgctgtggccctgcccatg

SEQ ID NO: 2441 - DNA, 19 bp, Homo sapiens
atgggcagggccacagcag

SEQ ID NO: 2442 - DNA, 19 bp, Homo sapiens
ctgctgtggccctgcccat

SEQ ID NO: 2443 - DNA, 19 bp, Homo sapiens
tgggcagggccacagcaga

SEQ ID NO: 2444 - DNA, 19 bp, Homo sapiens
tctgctgtggccctgccca

SEQ ID NO: 2445 - DNA, 19 bp, Homo sapiens
gggcagggccacagcagag

SEQ ID NO: 2446 - DNA, 19 bp, Homo sapiens
ctctgctgtggccctgccc

SEQ ID NO: 2447 - DNA, 19 bp, Homo sapiens
ggcagggccacagcagaga

SEQ ID NO: 2448 - DNA, 19 bp, Homo sapiens
tctctgctgtggccctgcc

SEQ ID NO: 2449 - DNA, 19 bp, Homo sapiens
gcagggccacagcagagag

SEQ ID NO: 2450 - DNA, 19 bp, Homo sapiens
ctctctgctgtggccctgc

SEQ ID NO: 2451 - DNA, 19 bp, Homo sapiens
cagggccacagcagagaga

SEQ ID NO: 2452 - DNA, 19 bp, Homo sapiens
tctctctgctgtggccctg

SEQ ID NO: 2453 - DNA, 19 bp, Homo sapiens
agggccacagcagagagac

SEQ ID NO: 2454 - DNA, 19 bp, Homo sapiens
gtctctctgctgtggccct

SEQ ID NO: 2455 - DNA, 19 bp, Homo sapiens
gggccacagcagagagaca

SEQ ID NO: 2456 - DNA, 19 bp, Homo sapiens
tgtctctctgctgtggccc

SEQ ID NO: 2457 - DNA, 19 bp, Homo sapiens
ggccacagcagagagacac

SEQ ID NO: 2458 - DNA, 19 bp, Homo sapiens
gtgtctctctgctgtggcc

SEQ ID NO: 2459 - DNA, 19 bp, Homo sapiens
gccacagcagagagacaca

SEQ ID NO: 2460 - DNA, 19 bp, Homo sapiens
tgtgtctctctgctgtggc

SEQ ID NO: 2461 - DNA, 19 bp, Homo sapiens
ccacagcagagagacacag

SEQ ID NO: 2462 - DNA, 19 bp, Homo sapiens
ctgtgtctctctgctgtgg

SEQ ID NO: 2463 - DNA, 19 bp, Homo sapiens
cacagcagagagacacagc

SEQ ID NO: 2464 - DNA, 19 bp, Homo sapiens
gctgtgtctctctgctgtg

SEQ ID NO: 2465 - DNA, 19 bp, Homo sapiens
acagcagagagacacagca

SEQ ID NO: 2466 - DNA, 19 bp, Homo sapiens
tgctgtgtctctctgctgt

SEQ ID NO: 2467 - DNA, 19 bp, Homo sapiens
cagcagagagacacagcat

SEQ ID NO: 2468 - DNA, 19 bp, Homo sapiens
atgctgtgtctctctgctg

SEQ ID NO: 2469 - DNA, 19 bp, Homo sapiens
agcagagagacacagcatg

SEQ ID NO: 2470 - DNA, 19 bp, Homo sapiens
catgctgtgtctctctgct

SEQ ID NO: 2471 - DNA, 19 bp, Homo sapiens
gcagagagacacagcatgg

SEQ ID NO: 2472 - DNA, 19 bp, Homo sapiens
ccatgctgtgtctctctgc

SEQ ID NO: 2473 - DNA, 19 bp, Homo sapiens
cagagagacacagcatggg

SEQ ID NO: 2474 - DNA, 19 bp, Homo sapiens
cccatgctgtgtctctctg

SEQ ID NO: 2475 - DNA, 19 bp, Homo sapiens
agagagacacagcatgggc

SEQ ID NO: 2476 - DNA, 19 bp, Homo sapiens
gcccatgctgtgtctctct

SEQ ID NO: 2477 - DNA, 19 bp, Homo sapiens
gagagacacagcatgggca

SEQ ID NO: 2478 - DNA, 19 bp, Homo sapiens
tgcccatgctgtgtctctc

SEQ ID NO: 2479 - DNA, 19 bp, Homo sapiens
agagacacagcatgggcag

SEQ ID NO: 2480 - DNA, 19 bp, Homo sapiens
ctgcccatgctgtgtctct

SEQ ID NO: 2481 - DNA, 19 bp, Homo sapiens
gagacacagcatgggcagt

SEQ ID NO: 2482 - DNA, 19 bp, Homo sapiens
actgcccatgctgtgtctc

SEQ ID NO: 2483 - DNA, 19 bp, Homo sapiens
agacacagcatgggcagtg

SEQ ID NO: 2484 - DNA, 19 bp, Homo sapiens
cactgcccatgctgtgtct

SEQ ID NO: 2485 - DNA, 19 bp, Homo sapiens
gacacagcatgggcagtgc

SEQ ID NO: 2486 - DNA, 19 bp, Homo sapiens
gcactgcccatgctgtgtc

SEQ ID NO: 2487 - DNA, 19 bp, Homo sapiens
acacagcatgggcagtgcc

SEQ ID NO: 2488 - DNA, 19 bp, Homo sapiens
ggcactgcccatgctgtgt

SEQ ID NO: 2489 - DNA, 19 bp, Homo sapiens
cacagcatgggcagtgcct

SEQ ID NO: 2490 - DNA, 19 bp, Homo sapiens
aggcactgcccatgctgtg

SEQ ID NO: 2491 - DNA, 19 bp, Homo sapiens
acagcatgggcagtgcctt

SEQ ID NO: 2492 - DNA, 19 bp, Homo sapiens
aaggcactgcccatgctgt

SEQ ID NO: 2493 - DNA, 19 bp, Homo sapiens
cagcatgggcagtgccttc

SEQ ID NO: 2494 - DNA, 19 bp, Homo sapiens
gaaggcactgcccatgctg

SEQ ID NO: 2495 - DNA, 19 bp, Homo sapiens
agcatgggcagtgccttcc

SEQ ID NO: 2496 - DNA, 19 bp, Homo sapiens
ggaaggcactgcccatgct

SEQ ID NO: 2497 - DNA, 19 bp, Homo sapiens
gcatgggcagtgccttccc

SEQ ID NO: 2498 - DNA, 19 bp, Homo sapiens
gggaaggcactgcccatgc

SEQ ID NO: 2499 - DNA, 19 bp, Homo sapiens
catgggcagtgccttccct

SEQ ID NO: 2500 - DNA, 19 bp, Homo sapiens
agggaaggcactgcccatg

SEQ ID NO: 2501 - DNA, 19 bp, Homo sapiens
atgggcagtgccttccctg

SEQ ID NO: 2502 - DNA, 19 bp, Homo sapiens
cagggaaggcactgcccat

SEQ ID NO: 2503 - DNA, 19 bp, Homo sapiens
tgggcagtgccttccctgc

SEQ ID NO: 2504 - DNA, 19 bp, Homo sapiens
gcagggaaggcactgccca

SEQ ID NO: 2505 - DNA, 19 bp, Homo sapiens
gggcagtgccttccctgcc

SEQ ID NO: 2506 - DNA, 19 bp, Homo sapiens
ggcagggaaggcactgccc

SEQ ID NO: 2507 - DNA, 19 bp, Homo sapiens
ggcagtgccttccctgcct

SEQ ID NO: 2508 - DNA, 19 bp, Homo sapiens
aggcagggaaggcactgcc

SEQ ID NO: 2509 - DNA, 19 bp, Homo sapiens
gcagtgccttccctgcctg

SEQ ID NO: 2510 - DNA, 19 bp, Homo sapiens
caggcagggaaggcactgc

SEQ ID NO: 2511 - DNA, 19 bp, Homo sapiens
cagtgccttccctgcctgt

SEQ ID NO: 2512 - DNA, 19 bp, Homo sapiens
acaggcagggaaggcactg

SEQ ID NO: 2513 - DNA, 19 bp, Homo sapiens
agtgccttccctgcctgtg

SEQ ID NO: 2514 - DNA, 19 bp, Homo sapiens
cacaggcagggaaggcact

SEQ ID NO: 2515 - DNA, 19 bp, Homo sapiens
gtgccttccctgcctgtgg

SEQ ID NO: 2516 - DNA, 19 bp, Homo sapiens
ccacaggcagggaaggcac

SEQ ID NO: 2517 - DNA, 19 bp, Homo sapiens
tgccttccctgcctgtggg

SEQ ID NO: 2518 - DNA, 19 bp, Homo sapiens
cccacaggcagggaaggca

SEQ ID NO: 2519 - DNA, 19 bp, Homo sapiens
gccttccctgcctgtgggg

SEQ ID NO: 2520 - DNA, 19 bp, Homo sapiens
ccccacaggcagggaaggc

SEQ ID NO: 2521 - DNA, 19 bp, Homo sapiens
ccttccctgcctgtggggg

SEQ ID NO: 2522 - DNA, 19 bp, Homo sapiens
cccccacaggcagggaagg

SEQ ID NO: 2523 - DNA, 19 bp, Homo sapiens
cttccctgcctgtgggggt

SEQ ID NO: 2524 - DNA, 19 bp, Homo sapiens
acccccacaggcagggaag

SEQ ID NO: 2525 - DNA, 19 bp, Homo sapiens
ttccctgcctgtgggggtc

SEQ ID NO: 2526 - DNA, 19 bp, Homo sapiens
gacccccacaggcagggaa

SEQ ID NO: 2527 - DNA, 19 bp, Homo sapiens
tccctgcctgtgggggtca

SEQ ID NO: 2528 - DNA, 19 bp, Homo sapiens
tgacccccacaggcaggga

SEQ ID NO: 2529 - DNA, 19 bp, Homo sapiens
ccctgcctgtgggggtcat

SEQ ID NO: 2530 - DNA, 19 bp, Homo sapiens
atgacccccacaggcaggg

SEQ ID NO: 2531 - DNA, 19 bp, Homo sapiens
cctgcctgtgggggtcatg

SEQ ID NO: 2532 - DNA, 19 bp, Homo sapiens
catgacccccacaggcagg

SEQ ID NO: 2533 - DNA, 19 bp, Homo sapiens
ctgcctgtgggggtcatgc

SEQ ID NO: 2534 - DNA, 19 bp, Homo sapiens
gcatgacccccacaggcag

SEQ ID NO: 2535 - DNA, 19 bp, Homo sapiens
tgcctgtgggggtcatgct

SEQ ID NO: 2536 - DNA, 19 bp, Homo sapiens
agcatgacccccacaggca

SEQ ID NO: 2537 - DNA, 19 bp, Homo sapiens
gcctgtgggggtcatgctg

SEQ ID NO: 2538 - DNA, 19 bp, Homo sapiens
cagcatgacccccacaggc

SEQ ID NO: 2539 - DNA, 19 bp, Homo sapiens
cctgtgggggtcatgctgc

SEQ ID NO: 2540 - DNA, 19 bp, Homo sapiens
gcagcatgacccccacagg

SEQ ID NO: 2541 - DNA, 19 bp, Homo sapiens
ctgtgggggtcatgctgcc

SEQ ID NO: 2542 - DNA, 19 bp, Homo sapiens
ggcagcatgacccccacag

SEQ ID NO: 2543 - DNA, 19 bp, Homo sapiens
tgtgggggtcatgctgcca

SEQ ID NO: 2544 - DNA, 19 bp, Homo sapiens
tggcagcatgacccccaca

SEQ ID NO: 2545 - DNA, 19 bp, Homo sapiens
gtgggggtcatgctgccac

SEQ ID NO: 2546 - DNA, 19 bp, Homo sapiens
gtggcagcatgacccccac

SEQ ID NO: 2547 - DNA, 19 bp, Homo sapiens
tgggggtcatgctgccact

SEQ ID NO: 2548 - DNA, 19 bp, Homo sapiens
agtggcagcatgaccccca

SEQ ID NO: 2549 - DNA, 19 bp, Homo sapiens
gggggtcatgctgccactt

SEQ ID NO: 2550 - DNA, 19 bp, Homo sapiens
aagtggcagcatgaccccc

SEQ ID NO: 2551 - DNA, 19 bp, Homo sapiens
ggggtcatgctgccacttt

SEQ ID NO: 2552 - DNA, 19 bp, Homo sapiens
aaagtggcagcatgacccc

SEQ ID NO: 2553 - DNA, 19 bp, Homo sapiens
gggtcatgctgccactttt

SEQ ID NO: 2554 - DNA, 19 bp, Homo sapiens
aaaagtggcagcatgaccc

SEQ ID NO: 2555 - DNA, 19 bp, Homo sapiens
ggtcatgctgccactttta

SEQ ID NO: 2556 - DNA, 19 bp, Homo sapiens
taaaagtggcagcatgacc

SEQ ID NO: 2557 - DNA, 19 bp, Homo sapiens
gtcatgctgccacttttaa

SEQ ID NO: 2558 - DNA, 19 bp, Homo sapiens
ttaaaagtggcagcatgac

SEQ ID NO: 2559 - DNA, 19 bp, Homo sapiens
tcatgctgccacttttaat

SEQ ID NO: 2560 - DNA, 19 bp, Homo sapiens
attaaaagtggcagcatga

SEQ ID NO: 2561 - DNA, 19 bp, Homo sapiens
catgctgccacttttaatg

SEQ ID NO: 2562 - DNA, 19 bp, Homo sapiens
cattaaaagtggcagcatg

SEQ ID NO: 2563 - DNA, 19 bp, Homo sapiens
atgctgccacttttaatgg

SEQ ID NO: 2564 - DNA, 19 bp, Homo sapiens
ccattaaaagtggcagcat

SEQ ID NO: 2565 - DNA, 19 bp, Homo sapiens
tgctgccacttttaatggg

SEQ ID NO: 2566 - DNA, 19 bp, Homo sapiens
cccattaaaagtggcagca

SEQ ID NO: 2567 - DNA, 19 bp, Homo sapiens
gctgccacttttaatgggt

SEQ ID NO: 2568 - DNA, 19 bp, Homo sapiens
acccattaaaagtggcagc

SEQ ID NO: 2569 - DNA, 19 bp, Homo sapiens
ctgccacttttaatgggtc

SEQ ID NO: 2570 - DNA, 19 bp, Homo sapiens
gacccattaaaagtggcag

SEQ ID NO: 2571 - DNA, 19 bp, Homo sapiens
tgccacttttaatgggtcc

SEQ ID NO: 2572 - DNA, 19 bp, Homo sapiens
ggacccattaaaagtggca

SEQ ID NO: 2573 - DNA, 19 bp, Homo sapiens
gccacttttaatgggtcct

SEQ ID NO: 2574 - DNA, 19 bp, Homo sapiens
aggacccattaaaagtggc

SEQ ID NO: 2575 - DNA, 19 bp, Homo sapiens
ccacttttaatgggtcctc

SEQ ID NO: 2576 - DNA, 19 bp, Homo sapiens
gaggacccattaaaagtgg

SEQ ID NO: 2577 - DNA, 19 bp, Homo sapiens
cacttttaatgggtcctcc

SEQ ID NO: 2578 - DNA, 19 bp, Homo sapiens
ggaggacccattaaaagtg

SEQ ID NO: 2579 - DNA, 19 bp, Homo sapiens
acttttaatgggtcctcca

SEQ ID NO: 2580 - DNA, 19 bp, Homo sapiens
tggaggacccattaaaagt

SEQ ID NO: 2581 - DNA, 19 bp, Homo sapiens
cttttaatgggtcctccac

SEQ ID NO: 2582 - DNA, 19 bp, Homo sapiens
gtggaggacccattaaaag

SEQ ID NO: 2583 - DNA, 19 bp, Homo sapiens
ttttaatgggtcctccacc

SEQ ID NO: 2584 - DNA, 19 bp, Homo sapiens
ggtggaggacccattaaaa

SEQ ID NO: 2585 - DNA, 19 bp, Homo sapiens
tttaatgggtcctccaccc

SEQ ID NO: 2586 - DNA, 19 bp, Homo sapiens
gggtggaggacccattaaa

SEQ ID NO: 2587 - DNA, 19 bp, Homo sapiens
ttaatgggtcctccaccca

SEQ ID NO: 2588 - DNA, 19 bp, Homo sapiens
tgggtggaggacccattaa

SEQ ID NO: 2589 - DNA, 19 bp, Homo sapiens
taatgggtcctccacccaa

SEQ ID NO: 2590 - DNA, 19 bp, Homo sapiens
ttgggtggaggacccatta

SEQ ID NO: 2591 - DNA, 19 bp, Homo sapiens
aatgggtcctccacccaac

SEQ ID NO: 2592 - DNA, 19 bp, Homo sapiens
gttgggtggaggacccatt

SEQ ID NO: 2593 - DNA, 19 bp, Homo sapiens
atgggtcctccacccaacg

SEQ ID NO: 2594 - DNA, 19 bp, Homo sapiens
cgttgggtggaggacccat

SEQ ID NO: 2595 - DNA, 19 bp, Homo sapiens
tgggtcctccacccaacgg

SEQ ID NO: 2596 - DNA, 19 bp, Homo sapiens
ccgttgggtggaggaccca

SEQ ID NO: 2597 - DNA, 19 bp, Homo sapiens
gggtcctccacccaacggg

SEQ ID NO: 2598 - DNA, 19 bp, Homo sapiens
cccgttgggtggaggaccc

SEQ ID NO: 2599 - DNA, 19 bp, Homo sapiens
ggtcctccacccaacgggg

SEQ ID NO: 2600 - DNA, 19 bp, Homo sapiens
ccccgttgggtggaggacc

SEQ ID NO: 2601 - DNA, 19 bp, Homo sapiens
gtcctccacccaacggggt

SEQ ID NO: 2602 - DNA, 19 bp, Homo sapiens
accccgttgggtggaggac

SEQ ID NO: 2603 - DNA, 19 bp, Homo sapiens
tcctccacccaacggggtc

SEQ ID NO: 2604 - DNA, 19 bp, Homo sapiens
gaccccgttgggtggagga

SEQ ID NO: 2605 - DNA, 19 bp, Homo sapiens
cctccacccaacggggtca

SEQ ID NO: 2606 - DNA, 19 bp, Homo sapiens
tgaccccgttgggtggagg

SEQ ID NO: 2607 - DNA, 19 bp, Homo sapiens
ctccacccaacggggtcag

SEQ ID NO: 2608 - DNA, 19 bp, Homo sapiens
ctgaccccgttgggtggag

SEQ ID NO: 2609 - DNA, 19 bp, Homo sapiens
tccacccaacggggtcagg

SEQ ID NO: 2610 - DNA, 19 bp, Homo sapiens
cctgaccccgttgggtgga

SEQ ID NO: 2611 - DNA, 19 bp, Homo sapiens
ccacccaacggggtcaggg

SEQ ID NO: 2612 - DNA, 19 bp, Homo sapiens
ccctgaccccgttgggtgg

SEQ ID NO: 2613 - DNA, 19 bp, Homo sapiens
cacccaacggggtcaggga

SEQ ID NO: 2614 - DNA, 19 bp, Homo sapiens
tccctgaccccgttgggtg

SEQ ID NO: 2615 - DNA, 19 bp, Homo sapiens
acccaacggggtcagggag

SEQ ID NO: 2616 - DNA, 19 bp, Homo sapiens
ctccctgaccccgttgggt

SEQ ID NO: 2617 - DNA, 19 bp, Homo sapiens
cccaacggggtcagggagg

SEQ ID NO: 2618 - DNA, 19 bp, Homo sapiens
cctccctgaccccgttggg

SEQ ID NO: 2619 - DNA, 19 bp, Homo sapiens
ccaacggggtcagggaggt

SEQ ID NO: 2620 - DNA, 19 bp, Homo sapiens
acctccctgaccccgttgg

SEQ ID NO: 2621 - DNA, 19 bp, Homo sapiens
caacggggtcagggaggtg

SEQ ID NO: 2622 - DNA, 19 bp, Homo sapiens
cacctccctgaccccgttg

SEQ ID NO: 2623 - DNA, 19 bp, Homo sapiens
aacggggtcagggaggtgg

SEQ ID NO: 2624 - DNA, 19 bp, Homo sapiens
ccacctccctgaccccgtt

SEQ ID NO: 2625 - DNA, 19 bp, Homo sapiens
acggggtcagggaggtggt

SEQ ID NO: 2626 - DNA, 19 bp, Homo sapiens
accacctccctgaccccgt

SEQ ID NO: 2627 - DNA, 19 bp, Homo sapiens
cggggtcagggaggtggtg

SEQ ID NO: 2628 - DNA, 19 bp, Homo sapiens
caccacctccctgaccccg

SEQ ID NO: 2629 - DNA, 19 bp, Homo sapiens
ggggtcagggaggtggtgc

SEQ ID NO: 2630 - DNA, 19 bp, Homo sapiens
gcaccacctccctgacccc

SEQ ID NO: 2631 - DNA, 19 bp, Homo sapiens
gggtcagggaggtggtgct

SEQ ID NO: 2632 - DNA, 19 bp, Homo sapiens
agcaccacctccctgaccc

SEQ ID NO: 2633 - DNA, 19 bp, Homo sapiens
ggtcagggaggtggtgctg

SEQ ID NO: 2634 - DNA, 19 bp, Homo sapiens
cagcaccacctccctgacc

SEQ ID NO: 2635 - DNA, 19 bp, Homo sapiens
gtcagggaggtggtgctgc

SEQ ID NO: 2636 - DNA, 19 bp, Homo sapiens
gcagcaccacctccctgac

SEQ ID NO: 2637 - DNA, 19 bp, Homo sapiens
tcagggaggtggtgctgcc

SEQ ID NO: 2638 - DNA, 19 bp, Homo sapiens
ggcagcaccacctccctga

SEQ ID NO: 2639 - DNA, 19 bp, Homo sapiens
cagggaggtggtgctgccc

SEQ ID NO: 2640 - DNA, 19 bp, Homo sapiens
gggcagcaccacctccctg

SEQ ID NO: 2641 - DNA, 19 bp, Homo sapiens
agggaggtggtgctgcccc

SEQ ID NO: 2642 - DNA, 19 bp, Homo sapiens
ggggcagcaccacctccct

SEQ ID NO: 2643 - DNA, 19 bp, Homo sapiens
gggaggtggtgctgcccca

SEQ ID NO: 2644 - DNA, 19 bp, Homo sapiens
tggggcagcaccacctccc

SEQ ID NO: 2645 - DNA, 19 bp, Homo sapiens
ggaggtggtgctgccccag

SEQ ID NO: 2646 - DNA, 19 bp, Homo sapiens
ctggggcagcaccacctcc

SEQ ID NO: 2647 - DNA, 19 bp, Homo sapiens
gaggtggtgctgccccagt

SEQ ID NO: 2648 - DNA, 19 bp, Homo sapiens
actggggcagcaccacctc

SEQ ID NO: 2649 - DNA, 19 bp, Homo sapiens
aggtggtgctgccccagtg

SEQ ID NO: 2650 - DNA, 19 bp, Homo sapiens
cactggggcagcaccacct

SEQ ID NO: 2651 - DNA, 19 bp, Homo sapiens
ggtggtgctgccccagtgg

SEQ ID NO: 2652 - DNA, 19 bp, Homo sapiens
ccactggggcagcaccacc

SEQ ID NO: 2653 - DNA, 19 bp, Homo sapiens
gtggtgctgccccagtggg

SEQ ID NO: 2654 - DNA, 19 bp, Homo sapiens
cccactggggcagcaccac

SEQ ID NO: 2655 - DNA, 19 bp, Homo sapiens
tggtgctgccccagtgggc

SEQ ID NO: 2656 - DNA, 19 bp, Homo sapiens
gcccactggggcagcacca

SEQ ID NO: 2657 - DNA, 19 bp, Homo sapiens
ggtgctgccccagtgggcc

SEQ ID NO: 2658 - DNA, 19 bp, Homo sapiens
ggcccactggggcagcacc

SEQ ID NO: 2659 - DNA, 19 bp, Homo sapiens
gtgctgccccagtgggcca

SEQ ID NO: 2660 - DNA, 19 bp, Homo sapiens
tggcccactggggcagcac

SEQ ID NO: 2661 - DNA, 19 bp, Homo sapiens
tgctgccccagtgggccat

SEQ ID NO: 2662 - DNA, 19 bp, Homo sapiens
atggcccactggggcagca

SEQ ID NO: 2663 - DNA, 19 bp, Homo sapiens
gctgccccagtgggccatg

SEQ ID NO: 2664 - DNA, 19 bp, Homo sapiens
catggcccactggggcagc

SEQ ID NO: 2665 - DNA, 19 bp, Homo sapiens
ctgccccagtgggccatga

SEQ ID NO: 2666 - DNA, 19 bp, Homo sapiens
tcatggcccactggggcag

SEQ ID NO: 2667 - DNA, 19 bp, Homo sapiens
tgccccagtgggccatgat

SEQ ID NO: 2668 - DNA, 19 bp, Homo sapiens
atcatggcccactggggca

SEQ ID NO: 2669 - DNA, 19 bp, Homo sapiens
gccccagtgggccatgatt

SEQ ID NO: 2670 - DNA, 19 bp, Homo sapiens
aatcatggcccactggggc

SEQ ID NO: 2671 - DNA, 19 bp, Homo sapiens
ccccagtgggccatgatta

SEQ ID NO: 2672 - DNA, 19 bp, Homo sapiens
taatcatggcccactgggg

SEQ ID NO: 2673 - DNA, 19 bp, Homo sapiens
cccagtgggccatgattat

SEQ ID NO: 2674 - DNA, 19 bp, Homo sapiens
ataatcatggcccactggg

SEQ ID NO: 2675 - DNA, 19 bp, Homo sapiens
ccagtgggccatgattatc

SEQ ID NO: 2676 - DNA, 19 bp, Homo sapiens
gataatcatggcccactgg

SEQ ID NO: 2677 - DNA, 19 bp, Homo sapiens
cagtgggccatgattatct

SEQ ID NO: 2678 - DNA, 19 bp, Homo sapiens
agataatcatggcccactg

SEQ ID NO: 2679 - DNA, 19 bp, Homo sapiens
agtgggccatgattatctt

SEQ ID NO: 2680 - DNA, 19 bp, Homo sapiens
aagataatcatggcccact

SEQ ID NO: 2681 - DNA, 19 bp, Homo sapiens
gtgggccatgattatctta

SEQ ID NO: 2682 - DNA, 19 bp, Homo sapiens
taagataatcatggcccac

SEQ ID NO: 2683 - DNA, 19 bp, Homo sapiens
tgggccatgattatcttaa

SEQ ID NO: 2684 - DNA, 19 bp, Homo sapiens
ttaagataatcatggccca

SEQ ID NO: 2685 - DNA, 19 bp, Homo sapiens
gggccatgattatcttaaa

SEQ ID NO: 2686 - DNA, 19 bp, Homo sapiens
tttaagataatcatggccc

SEQ ID NO: 2687 - DNA, 19 bp, Homo sapiens
ggccatgattatcttaaag

SEQ ID NO: 2688 - DNA, 19 bp, Homo sapiens
ctttaagataatcatggcc

SEQ ID NO: 2689 - DNA, 19 bp, Homo sapiens
gccatgattatcttaaagg

SEQ ID NO: 2690 - DNA, 19 bp, Homo sapiens
cctttaagataatcatggc

SEQ ID NO: 2691 - DNA, 19 bp, Homo sapiens
ccatgattatcttaaaggc

SEQ ID NO: 2692 - DNA, 19 bp, Homo sapiens
gcctttaagataatcatgg

SEQ ID NO: 2693 - DNA, 19 bp, Homo sapiens
catgattatcttaaaggca

SEQ ID NO: 2694 - DNA, 19 bp, Homo sapiens
tgcctttaagataatcatg

SEQ ID NO: 2695 - DNA, 19 bp, Homo sapiens
atgattatcttaaaggcat

SEQ ID NO: 2696 - DNA, 19 bp, Homo sapiens
atgcctttaagataatcat

SEQ ID NO: 2697 - DNA, 19 bp, Homo sapiens
tgattatcttaaaggcatt

SEQ ID NO: 2698 - DNA, 19 bp, Homo sapiens
aatgcctttaagataatca

SEQ ID NO: 2699 - DNA, 19 bp, Homo sapiens
gattatcttaaaggcatta

SEQ ID NO: 2700 - DNA, 19 bp, Homo sapiens
taatgcctttaagataatc

SEQ ID NO: 2701 - DNA, 19 bp, Homo sapiens
attatcttaaaggcattat

SEQ ID NO: 2702 - DNA, 19 bp, Homo sapiens
ataatgcctttaagataat

SEQ ID NO: 2703 - DNA, 19 bp, Homo sapiens
ttatcttaaaggcattatt

SEQ ID NO: 2704 - DNA, 19 bp, Homo sapiens
aataatgcctttaagataa

SEQ ID NO: 2705 - DNA, 19 bp, Homo sapiens
tatcttaaaggcattattc

SEQ ID NO: 2706 - DNA, 19 bp, Homo sapiens
gaataatgcctttaagata

SEQ ID NO: 2707 - DNA, 19 bp, Homo sapiens
atcttaaaggcattattct

SEQ ID NO: 2708 - DNA, 19 bp, Homo sapiens
agaataatgcctttaagat

SEQ ID NO: 2709 - DNA, 19 bp, Homo sapiens
tcttaaaggcattattctc

SEQ ID NO: 2710 - DNA, 19 bp, Homo sapiens
gagaataatgcctttaaga

SEQ ID NO: 2711 - DNA, 19 bp, Homo sapiens
cttaaaggcattattctcc

SEQ ID NO: 2712 - DNA, 19 bp, Homo sapiens
ggagaataatgcctttaag

SEQ ID NO: 2713 - DNA, 19 bp, Homo sapiens
ttaaaggcattattctcca

SEQ ID NO: 2714 - DNA, 19 bp, Homo sapiens
tggagaataatgcctttaa

SEQ ID NO: 2715 - DNA, 19 bp, Homo sapiens
taaaggcattattctccag

SEQ ID NO: 2716 - DNA, 19 bp, Homo sapiens
ctggagaataatgccttta

SEQ ID NO: 2717 - DNA, 19 bp, Homo sapiens
aaaggcattattctccagc

SEQ ID NO: 2718 - DNA, 19 bp, Homo sapiens
gctggagaataatgccttt

SEQ ID NO: 2719 - DNA, 19 bp, Homo sapiens
aaggcattattctccagcc

SEQ ID NO: 2720 - DNA, 19 bp, Homo sapiens
ggctggagaataatgcctt

SEQ ID NO: 2721 - DNA, 19 bp, Homo sapiens
aggcattattctccagcct

SEQ ID NO: 2722 - DNA, 19 bp, Homo sapiens
aggctggagaataatgcct

SEQ ID NO: 2723 - DNA, 19 bp, Homo sapiens
ggcattattctccagcctt

SEQ ID NO: 2724 - DNA, 19 bp, Homo sapiens
aaggctggagaataatgcc

SEQ ID NO: 2725 - DNA, 19 bp, Homo sapiens
gcattattctccagcctta

SEQ ID NO: 2726 - DNA, 19 bp, Homo sapiens
taaggctggagaataatgc

SEQ ID NO: 2727 - DNA, 19 bp, Homo sapiens
cattattctccagccttaa

SEQ ID NO: 2728 - DNA, 19 bp, Homo sapiens
ttaaggctggagaataatg

SEQ ID NO: 2729 - DNA, 19 bp, Homo sapiens
attattctccagccttaag

SEQ ID NO: 2730 - DNA, 19 bp, Homo sapiens
cttaaggctggagaataat

SEQ ID NO: 2731 - DNA, 19 bp, Homo sapiens
ttattctccagccttaagt

SEQ ID NO: 2732 - DNA, 19 bp, Homo sapiens
acttaaggctggagaataa

SEQ ID NO: 2733 - DNA, 19 bp, Homo sapiens
tattctccagccttaagta

SEQ ID NO: 2734 - DNA, 19 bp, Homo sapiens
tacttaaggctggagaata

SEQ ID NO: 2735 - DNA, 19 bp, Homo sapiens
attctccagccttaagtaa

SEQ ID NO: 2736 - DNA, 19 bp, Homo sapiens
ttacttaaggctggagaat

SEQ ID NO: 2737 - DNA, 19 bp, Homo sapiens
ttctccagccttaagtaag

SEQ ID NO: 2738 - DNA, 19 bp, Homo sapiens
cttacttaaggctggagaa

SEQ ID NO: 2739 - DNA, 19 bp, Homo sapiens
tctccagccttaagtaaga

SEQ ID NO: 2740 - DNA, 19 bp, Homo sapiens
tcttacttaaggctggaga

SEQ ID NO: 2741 - DNA, 19 bp, Homo sapiens
ctccagccttaagtaagat

SEQ ID NO: 2742 - DNA, 19 bp, Homo sapiens
atcttacttaaggctggag

SEQ ID NO: 2743 - DNA, 19 bp, Homo sapiens
tccagccttaagtaagatc

SEQ ID NO: 2744 - DNA, 19 bp, Homo sapiens
gatcttacttaaggctgga

SEQ ID NO: 2745 - DNA, 19 bp, Homo sapiens
ccagccttaagtaagatct

SEQ ID NO: 2746 - DNA, 19 bp, Homo sapiens
agatcttacttaaggctgg

SEQ ID NO: 2747 - DNA, 19 bp, Homo sapiens
cagccttaagtaagatctt

SEQ ID NO: 2748 - DNA, 19 bp, Homo sapiens
aagatcttacttaaggctg

SEQ ID NO: 2749 - DNA, 19 bp, Homo sapiens
agccttaagtaagatctta

SEQ ID NO: 2750 - DNA, 19 bp, Homo sapiens
taagatcttacttaaggct

SEQ ID NO: 2751 - DNA, 19 bp, Homo sapiens
gccttaagtaagatcttag

SEQ ID NO: 2752 - DNA, 19 bp, Homo sapiens
ctaagatcttacttaaggc

SEQ ID NO: 2753 - DNA, 19 bp, Homo sapiens
ccttaagtaagatcttagg

SEQ ID NO: 2754 - DNA, 19 bp, Homo sapiens
cctaagatcttacttaagg

SEQ ID NO: 2755 - DNA, 19 bp, Homo sapiens
cttaagtaagatcttagga

SEQ ID NO: 2756 - DNA, 19 bp, Homo sapiens
tcctaagatcttacttaag

SEQ ID NO: 2757 - DNA, 19 bp, Homo sapiens
ttaagtaagatcttaggac

SEQ ID NO: 2758 - DNA, 19 bp, Homo sapiens
gtcctaagatcttacttaa

SEQ ID NO: 2759 - DNA, 19 bp, Homo sapiens
taagtaagatcttaggacg

SEQ ID NO: 2760 - DNA, 19 bp, Homo sapiens
cgtcctaagatcttactta

SEQ ID NO: 2761 - DNA, 19 bp, Homo sapiens
aagtaagatcttaggacgt

SEQ ID NO: 2762 - DNA, 19 bp, Homo sapiens
acgtcctaagatcttactt

SEQ ID NO: 2763 - DNA, 19 bp, Homo sapiens
agtaagatcttaggacgtt

SEQ ID NO: 2764 - DNA, 19 bp, Homo sapiens
aacgtcctaagatcttact

SEQ ID NO: 2765 - DNA, 19 bp, Homo sapiens
gtaagatcttaggacgttt

SEQ ID NO: 2766 - DNA, 19 bp, Homo sapiens
aaacgtcctaagatcttac

SEQ ID NO: 2767 - DNA, 19 bp, Homo sapiens
taagatcttaggacgtttc

SEQ ID NO: 2768 - DNA, 19 bp, Homo sapiens
gaaacgtcctaagatctta

SEQ ID NO: 2769 - DNA, 19 bp, Homo sapiens
aagatcttaggacgtttcc

SEQ ID NO: 2770 - DNA, 19 bp, Homo sapiens
ggaaacgtcctaagatctt

SEQ ID NO: 2771 - DNA, 19 bp, Homo sapiens
agatcttaggacgtttcct

SEQ ID NO: 2772 - DNA, 19 bp, Homo sapiens
aggaaacgtcctaagatct

SEQ ID NO: 2773 - DNA, 19 bp, Homo sapiens
gatcttaggacgtttcctt

SEQ ID NO: 2774 - DNA, 19 bp, Homo sapiens
aaggaaacgtcctaagatc

SEQ ID NO: 2775 - DNA, 19 bp, Homo sapiens
atcttaggacgtttccttt

SEQ ID NO: 2776 - DNA, 19 bp, Homo sapiens
aaaggaaacgtcctaagat

SEQ ID NO: 2777 - DNA, 19 bp, Homo sapiens
tcttaggacgtttcctttg

SEQ ID NO: 2778 - DNA, 19 bp, Homo sapiens
caaaggaaacgtcctaaga

SEQ ID NO: 2779 - DNA, 19 bp, Homo sapiens
cttaggacgtttcctttgc

SEQ ID NO: 2780 - DNA, 19 bp, Homo sapiens
gcaaaggaaacgtcctaag

SEQ ID NO: 2781 - DNA, 19 bp, Homo sapiens
ttaggacgtttcctttgct

SEQ ID NO: 2782 - DNA, 19 bp, Homo sapiens
agcaaaggaaacgtcctaa

SEQ ID NO: 2783 - DNA, 19 bp, Homo sapiens
taggacgtttcctttgcta

SEQ ID NO: 2784 - DNA, 19 bp, Homo sapiens
tagcaaaggaaacgtccta

SEQ ID NO: 2785 - DNA, 19 bp, Homo sapiens
aggacgtttcctttgctat

SEQ ID NO: 2786 - DNA, 19 bp, Homo sapiens
atagcaaaggaaacgtcct

SEQ ID NO: 2787 - DNA, 19 bp, Homo sapiens
ggacgtttcctttgctatg

SEQ ID NO: 2788 - DNA, 19 bp, Homo sapiens
catagcaaaggaaacgtcc

SEQ ID NO: 2789 - DNA, 19 bp, Homo sapiens
gacgtttcctttgctatga

SEQ ID NO: 2790 - DNA, 19 bp, Homo sapiens
tcatagcaaaggaaacgtc

SEQ ID NO: 2791 - DNA, 19 bp, Homo sapiens
acgtttcctttgctatgat

SEQ ID NO: 2792 - DNA, 19 bp, Homo sapiens
atcatagcaaaggaaacgt

SEQ ID NO: 2793 - DNA, 19 bp, Homo sapiens
cgtttcctttgctatgatt

SEQ ID NO: 2794 - DNA, 19 bp, Homo sapiens
aatcatagcaaaggaaacg

SEQ ID NO: 2795 - DNA, 19 bp, Homo sapiens
gtttcctttgctatgattt

SEQ ID NO: 2796 - DNA, 19 bp, Homo sapiens
aaatcatagcaaaggaaac

SEQ ID NO: 2797 - DNA, 19 bp, Homo sapiens
tttcctttgctatgatttg

SEQ ID NO: 2798 - DNA, 19 bp, Homo sapiens
caaatcatagcaaaggaaa

SEQ ID NO: 2799 - DNA, 19 bp, Homo sapiens
ttcctttgctatgatttgt

SEQ ID NO: 2800 - DNA, 19 bp, Homo sapiens
acaaatcatagcaaaggaa

SEQ ID NO: 2801 - DNA, 19 bp, Homo sapiens
tcctttgctatgatttgta

SEQ ID NO: 2802 - DNA, 19 bp, Homo sapiens
tacaaatcatagcaaagga

SEQ ID NO: 2803 - DNA, 19 bp, Homo sapiens
cctttgctatgatttgtac

SEQ ID NO: 2804 - DNA, 19 bp, Homo sapiens
gtacaaatcatagcaaagg

SEQ ID NO: 2805 - DNA, 19 bp, Homo sapiens
ctttgctatgatttgtact

SEQ ID NO: 2806 - DNA, 19 bp, Homo sapiens
agtacaaatcatagcaaag

SEQ ID NO: 2807 - DNA, 19 bp, Homo sapiens
tttgctatgatttgtactt

SEQ ID NO: 2808 - DNA, 19 bp, Homo sapiens
aagtacaaatcatagcaaa

SEQ ID NO: 2809 - DNA, 19 bp, Homo sapiens
ttgctatgatttgtacttg

SEQ ID NO: 2810 - DNA, 19 bp, Homo sapiens
caagtacaaatcatagcaa

SEQ ID NO: 2811 - DNA, 19 bp, Homo sapiens
tgctatgatttgtacttgc

SEQ ID NO: 2812 - DNA, 19 bp, Homo sapiens
gcaagtacaaatcatagca

SEQ ID NO: 2813 - DNA, 19 bp, Homo sapiens
gctatgatttgtacttgct

SEQ ID NO: 2814 - DNA, 19 bp, Homo sapiens
agcaagtacaaatcatagc

SEQ ID NO: 2815 - DNA, 19 bp, Homo sapiens
ctatgatttgtacttgctt

SEQ ID NO: 2816 - DNA, 19 bp, Homo sapiens
aagcaagtacaaatcatag

SEQ ID NO: 2817 - DNA, 19 bp, Homo sapiens
tatgatttgtacttgcttg

SEQ ID NO: 2818 - DNA, 19 bp, Homo sapiens
caagcaagtacaaatcata

SEQ ID NO: 2819 - DNA, 19 bp, Homo sapiens
atgatttgtacttgcttga

SEQ ID NO: 2820 - DNA, 19 bp, Homo sapiens
tcaagcaagtacaaatcat

SEQ ID NO: 2821 - DNA, 19 bp, Homo sapiens
tgatttgtacttgcttgag

SEQ ID NO: 2822 - DNA, 19 bp, Homo sapiens
ctcaagcaagtacaaatca

SEQ ID NO: 2823 - DNA, 19 bp, Homo sapiens
gatttgtacttgcttgagt

SEQ ID NO: 2824 - DNA, 19 bp, Homo sapiens
actcaagcaagtacaaatc

SEQ ID NO: 2825 - DNA, 19 bp, Homo sapiens
atttgtacttgcttgagtc

SEQ ID NO: 2826 - DNA, 19 bp, Homo sapiens
gactcaagcaagtacaaat

SEQ ID NO: 2827 - DNA, 19 bp, Homo sapiens
tttgtacttgcttgagtcc

SEQ ID NO: 2828 - DNA, 19 bp, Homo sapiens
ggactcaagcaagtacaaa

SEQ ID NO: 2829 - DNA, 19 bp, Homo sapiens
ttgtacttgcttgagtccc

SEQ ID NO: 2830 - DNA, 19 bp, Homo sapiens
gggactcaagcaagtacaa

SEQ ID NO: 2831 - DNA, 19 bp, Homo sapiens
tgtacttgcttgagtccca

SEQ ID NO: 2832 - DNA, 19 bp, Homo sapiens
tgggactcaagcaagtaca

SEQ ID NO: 2833 - DNA, 19 bp, Homo sapiens
gtacttgcttgagtcccat

SEQ ID NO: 2834 - DNA, 19 bp, Homo sapiens
atgggactcaagcaagtac

SEQ ID NO: 2835 - DNA, 19 bp, Homo sapiens
tacttgcttgagtcccatg

SEQ ID NO: 2836 - DNA, 19 bp, Homo sapiens
catgggactcaagcaagta

SEQ ID NO: 2837 - DNA, 19 bp, Homo sapiens
acttgcttgagtcccatga

SEQ ID NO: 2838 - DNA, 19 bp, Homo sapiens
tcatgggactcaagcaagt

SEQ ID NO: 2839 - DNA, 19 bp, Homo sapiens
cttgcttgagtcccatgac

SEQ ID NO: 2840 - DNA, 19 bp, Homo sapiens
gtcatgggactcaagcaag

SEQ ID NO: 2841 - DNA, 19 bp, Homo sapiens
ttgcttgagtcccatgact

SEQ ID NO: 2842 - DNA, 19 bp, Homo sapiens
agtcatgggactcaagcaa

SEQ ID NO: 2843 - DNA, 19 bp, Homo sapiens
tgcttgagtcccatgactg

SEQ ID NO: 2844 - DNA, 19 bp, Homo sapiens
cagtcatgggactcaagca

SEQ ID NO: 2845 - DNA, 19 bp, Homo sapiens
gcttgagtcccatgactgt

SEQ ID NO: 2846 - DNA, 19 bp, Homo sapiens
acagtcatgggactcaagc

SEQ ID NO: 2847 - DNA, 19 bp, Homo sapiens
cttgagtcccatgactgtt

SEQ ID NO: 2848 - DNA, 19 bp, Homo sapiens
aacagtcatgggactcaag

SEQ ID NO: 2849 - DNA, 19 bp, Homo sapiens
ttgagtcccatgactgttt

SEQ ID NO: 2850 - DNA, 19 bp, Homo sapiens
aaacagtcatgggactcaa

SEQ ID NO: 2851 - DNA, 19 bp, Homo sapiens
tgagtcccatgactgtttc

SEQ ID NO: 2852 - DNA, 19 bp, Homo sapiens
gaaacagtcatgggactca

SEQ ID NO: 2853 - DNA, 19 bp, Homo sapiens
gagtcccatgactgtttct

SEQ ID NO: 2854 - DNA, 19 bp, Homo sapiens
agaaacagtcatgggactc

SEQ ID NO: 2855 - DNA, 19 bp, Homo sapiens
agtcccatgactgtttctc

SEQ ID NO: 2856 - DNA, 19 bp, Homo sapiens
gagaaacagtcatgggact

SEQ ID NO: 2857 - DNA, 19 bp, Homo sapiens
gtcccatgactgtttctct

SEQ ID NO: 2858 - DNA, 19 bp, Homo sapiens
agagaaacagtcatgggac

SEQ ID NO: 2859 - DNA, 19 bp, Homo sapiens
tcccatgactgtttctctt

SEQ ID NO: 2860 - DNA, 19 bp, Homo sapiens
aagagaaacagtcatggga

SEQ ID NO: 2861 - DNA, 19 bp, Homo sapiens
cccatgactgtttctcttc

SEQ ID NO: 2862 - DNA, 19 bp, Homo sapiens
gaagagaaacagtcatggg

SEQ ID NO: 2863 - DNA, 19 bp, Homo sapiens
ccatgactgtttctcttcc

SEQ ID NO: 2864 - DNA, 19 bp, Homo sapiens
ggaagagaaacagtcatgg

SEQ ID NO: 2865 - DNA, 19 bp, Homo sapiens
catgactgtttctcttcct

SEQ ID NO: 2866 - DNA, 19 bp, Homo sapiens
aggaagagaaacagtcatg

SEQ ID NO: 2867 - DNA, 19 bp, Homo sapiens
atgactgtttctcttcctc

SEQ ID NO: 2868 - DNA, 19 bp, Homo sapiens
gaggaagagaaacagtcat

SEQ ID NO: 2869 - DNA, 19 bp, Homo sapiens
tgactgtttctcttcctct

SEQ ID NO: 2870 - DNA, 19 bp, Homo sapiens
agaggaagagaaacagtca

SEQ ID NO: 2871 - DNA, 19 bp, Homo sapiens
gactgtttctcttcctctc

SEQ ID NO: 2872 - DNA, 19 bp, Homo sapiens
gagaggaagagaaacagtc

SEQ ID NO: 2873 - DNA, 19 bp, Homo sapiens
actgtttctcttcctctct

SEQ ID NO: 2874 - DNA, 19 bp, Homo sapiens
agagaggaagagaaacagt

SEQ ID NO: 2875 - DNA, 19 bp, Homo sapiens
ctgtttctcttcctctctt

SEQ ID NO: 2876 - DNA, 19 bp, Homo sapiens
aagagaggaagagaaacag

SEQ ID NO: 2877 - DNA, 19 bp, Homo sapiens
tgtttctcttcctctcttt

SEQ ID NO: 2878 - DNA, 19 bp, Homo sapiens
aaagagaggaagagaaaca

SEQ ID NO: 2879 - DNA, 19 bp, Homo sapiens
gtttctcttcctctctttc

SEQ ID NO: 2880 - DNA, 19 bp, Homo sapiens
gaaagagaggaagagaaac

SEQ ID NO: 2881 - DNA, 19 bp, Homo sapiens
tttctcttcctctctttct

SEQ ID NO: 2882 - DNA, 19 bp, Homo sapiens
agaaagagaggaagagaaa

SEQ ID NO: 2883 - DNA, 19 bp, Homo sapiens
ttctcttcctctctttctt

SEQ ID NO: 2884 - DNA, 19 bp, Homo sapiens
aagaaagagaggaagagaa

SEQ ID NO: 2885 - DNA, 19 bp, Homo sapiens
tctcttcctctctttcttc

SEQ ID NO: 2886 - DNA, 19 bp, Homo sapiens
gaagaaagagaggaagaga

SEQ ID NO: 2887 - DNA, 19 bp, Homo sapiens
ctcttcctctctttcttcc

SEQ ID NO: 2888 - DNA, 19 bp, Homo sapiens
ggaagaaagagaggaagag

SEQ ID NO: 2889 - DNA, 19 bp, Homo sapiens
tcttcctctctttcttcct

SEQ ID NO: 2890 - DNA, 19 bp, Homo sapiens
aggaagaaagagaggaaga

SEQ ID NO: 2891 - DNA, 19 bp, Homo sapiens
cttcctctctttcttcctt

SEQ ID NO: 2892 - DNA, 19 bp, Homo sapiens
aaggaagaaagagaggaag

SEQ ID NO: 2893 - DNA, 19 bp, Homo sapiens
ttcctctctttcttccttt

SEQ ID NO: 2894 - DNA, 19 bp, Homo sapiens
aaaggaagaaagagaggaa

SEQ ID NO: 2895 - DNA, 19 bp, Homo sapiens
tcctctctttcttcctttt

SEQ ID NO: 2896 - DNA, 19 bp, Homo sapiens
aaaaggaagaaagagagga

SEQ ID NO: 2897 - DNA, 19 bp, Homo sapiens
cctctctttcttccttttg

SEQ ID NO: 2898 - DNA, 19 bp, Homo sapiens
caaaaggaagaaagagagg

SEQ ID NO: 2899 - DNA, 19 bp, Homo sapiens
ctctctttcttccttttgg

SEQ ID NO: 2900 - DNA, 19 bp, Homo sapiens
ccaaaaggaagaaagagag

SEQ ID NO: 2901 - DNA, 19 bp, Homo sapiens
tctctttcttccttttgga

SEQ ID NO: 2902 - DNA, 19 bp, Homo sapiens
tccaaaaggaagaaagaga

SEQ ID NO: 2903 - DNA, 19 bp, Homo sapiens
ctctttcttccttttggaa

SEQ ID NO: 2904 - DNA, 19 bp, Homo sapiens
ttccaaaaggaagaaagag

SEQ ID NO: 2905 - DNA, 19 bp, Homo sapiens
tctttcttccttttggaat

SEQ ID NO: 2906 - DNA, 19 bp, Homo sapiens
attccaaaaggaagaaaga

SEQ ID NO: 2907 - DNA, 19 bp, Homo sapiens
ctttcttccttttggaata

SEQ ID NO: 2908 - DNA, 19 bp, Homo sapiens
tattccaaaaggaagaaag

SEQ ID NO: 2909 - DNA, 19 bp, Homo sapiens
tttcttccttttggaatag

SEQ ID NO: 2910 - DNA, 19 bp, Homo sapiens
ctattccaaaaggaagaaa

SEQ ID NO: 2911 - DNA, 19 bp, Homo sapiens
ttcttccttttggaatagt

SEQ ID NO: 2912 - DNA, 19 bp, Homo sapiens
actattccaaaaggaagaa

SEQ ID NO: 2913 - DNA, 19 bp, Homo sapiens
tcttccttttggaatagta

SEQ ID NO: 2914 - DNA, 19 bp, Homo sapiens
tactattccaaaaggaaga

SEQ ID NO: 2915 - DNA, 19 bp, Homo sapiens
cttccttttggaatagtaa

SEQ ID NO: 2916 - DNA, 19 bp, Homo sapiens
ttactattccaaaaggaag

SEQ ID NO: 2917 - DNA, 19 bp, Homo sapiens
ttccttttggaatagtaat

SEQ ID NO: 2918 - DNA, 19 bp, Homo sapiens
attactattccaaaaggaa

SEQ ID NO: 2919 - DNA, 19 bp, Homo sapiens
tccttttggaatagtaata

SEQ ID NO: 2920 - DNA, 19 bp, Homo sapiens
tattactattccaaaagga

SEQ ID NO: 2921 - DNA, 19 bp, Homo sapiens
ccttttggaatagtaatat

SEQ ID NO: 2922 - DNA, 19 bp, Homo sapiens
atattactattccaaaagg

SEQ ID NO: 2923 - DNA, 19 bp, Homo sapiens
cttttggaatagtaatatc

SEQ ID NO: 2924 - DNA, 19 bp, Homo sapiens
gatattactattccaaaag

SEQ ID NO: 2925 - DNA, 19 bp, Homo sapiens
ttttggaatagtaatatcc

SEQ ID NO: 2926 - DNA, 19 bp, Homo sapiens
ggatattactattccaaaa

SEQ ID NO: 2927 - DNA, 19 bp, Homo sapiens
tttggaatagtaatatcca

SEQ ID NO: 2928 - DNA, 19 bp, Homo sapiens
tggatattactattccaaa

SEQ ID NO: 2929 - DNA, 19 bp, Homo sapiens
ttggaatagtaatatccat

SEQ ID NO: 2930 - DNA, 19 bp, Homo sapiens
atggatattactattccaa

SEQ ID NO: 2931 - DNA, 19 bp, Homo sapiens
tggaatagtaatatccatc

SEQ ID NO: 2932 - DNA, 19 bp, Homo sapiens
gatggatattactattcca

SEQ ID NO: 2933 - DNA, 19 bp, Homo sapiens
ggaatagtaatatccatcc

SEQ ID NO: 2934 - DNA, 19 bp, Homo sapiens
ggatggatattactattcc

SEQ ID NO: 2935 - DNA, 19 bp, Homo sapiens
gaatagtaatatccatcct

SEQ ID NO: 2936 - DNA, 19 bp, Homo sapiens
aggatggatattactattc

SEQ ID NO: 2937 - DNA, 19 bp, Homo sapiens
aatagtaatatccatccta

SEQ ID NO: 2938 - DNA, 19 bp, Homo sapiens
taggatggatattactatt

SEQ ID NO: 2939 - DNA, 19 bp, Homo sapiens
atagtaatatccatcctat

SEQ ID NO: 2940 - DNA, 19 bp, Homo sapiens
ataggatggatattactat

SEQ ID NO: 2941 - DNA, 19 bp, Homo sapiens
tagtaatatccatcctatg

SEQ ID NO: 2942 - DNA, 19 bp, Homo sapiens
cataggatggatattacta

SEQ ID NO: 2943 - DNA, 19 bp, Homo sapiens
agtaatatccatcctatgt

SEQ ID NO: 2944 - DNA, 19 bp, Homo sapiens
acataggatggatattact

SEQ ID NO: 2945 - DNA, 19 bp, Homo sapiens
gtaatatccatcctatgtt

SEQ ID NO: 2946 - DNA, 19 bp, Homo sapiens
aacataggatggatattac

SEQ ID NO: 2947 - DNA, 19 bp, Homo sapiens
taatatccatcctatgttt

SEQ ID NO: 2948 - DNA, 19 bp, Homo sapiens
aaacataggatggatatta

SEQ ID NO: 2949 - DNA, 19 bp, Homo sapiens
aatatccatcctatgtttg

SEQ ID NO: 2950 - DNA, 19 bp, Homo sapiens
caaacataggatggatatt

SEQ ID NO: 2951 - DNA, 19 bp, Homo sapiens
atatccatcctatgtttgt

SEQ ID NO: 2952 - DNA, 19 bp, Homo sapiens
acaaacataggatggatat

SEQ ID NO: 2953 - DNA, 19 bp, Homo sapiens
tatccatcctatgtttgtc

SEQ ID NO: 2954 - DNA, 19 bp, Homo sapiens
gacaaacataggatggata

SEQ ID NO: 2955 - DNA, 19 bp, Homo sapiens
atccatcctatgtttgtcc

SEQ ID NO: 2956 - DNA, 19 bp, Homo sapiens
ggacaaacataggatggat

SEQ ID NO: 2957 - DNA, 19 bp, Homo sapiens
tccatcctatgtttgtccc

SEQ ID NO: 2958 - DNA, 19 bp, Homo sapiens
gggacaaacataggatgga

SEQ ID NO: 2959 - DNA, 19 bp, Homo sapiens
ccatcctatgtttgtccca

SEQ ID NO: 2960 - DNA, 19 bp, Homo sapiens
tgggacaaacataggatgg

SEQ ID NO: 2961 - DNA, 19 bp, Homo sapiens
catcctatgtttgtcccac

SEQ ID NO: 2962 - DNA, 19 bp, Homo sapiens
gtgggacaaacataggatg

SEQ ID NO: 2963 - DNA, 19 bp, Homo sapiens
atcctatgtttgtcccact

SEQ ID NO: 2964 - DNA, 19 bp, Homo sapiens
agtgggacaaacataggat

SEQ ID NO: 2965 - DNA, 19 bp, Homo sapiens
tcctatgtttgtcccacta

SEQ ID NO: 2966 - DNA, 19 bp, Homo sapiens
tagtgggacaaacatagga

SEQ ID NO: 2967 - DNA, 19 bp, Homo sapiens
cctatgtttgtcccactat

SEQ ID NO: 2968 - DNA, 19 bp, Homo sapiens
atagtgggacaaacatagg

SEQ ID NO: 2969 - DNA, 19 bp, Homo sapiens
ctatgtttgtcccactatt

SEQ ID NO: 2970 - DNA, 19 bp, Homo sapiens
aatagtgggacaaacatag

SEQ ID NO: 2971 - DNA, 19 bp, Homo sapiens
tatgtttgtcccactattg

SEQ ID NO: 2972 - DNA, 19 bp, Homo sapiens
caatagtgggacaaacata

SEQ ID NO: 2973 - DNA, 19 bp, Homo sapiens
atgtttgtcccactattgt

SEQ ID NO: 2974 - DNA, 19 bp, Homo sapiens
acaatagtgggacaaacat

SEQ ID NO: 2975 - DNA, 19 bp, Homo sapiens
tgtttgtcccactattgta

SEQ ID NO: 2976 - DNA, 19 bp, Homo sapiens
tacaatagtgggacaaaca

SEQ ID NO: 2977 - DNA, 19 bp, Homo sapiens
gtttgtcccactattgtat

SEQ ID NO: 2978 - DNA, 19 bp, Homo sapiens
atacaatagtgggacaaac

SEQ ID NO: 2979 - DNA, 19 bp, Homo sapiens
tttgtcccactattgtatt

SEQ ID NO: 2980 - DNA, 19 bp, Homo sapiens
aatacaatagtgggacaaa

SEQ ID NO: 2981 - DNA, 19 bp, Homo sapiens
ttgtcccactattgtattt

SEQ ID NO: 2982 - DNA, 19 bp, Homo sapiens
aaatacaatagtgggacaa

SEQ ID NO: 2983 - DNA, 19 bp, Homo sapiens
tgtcccactattgtatttt

SEQ ID NO: 2984 - DNA, 19 bp, Homo sapiens
aaaatacaatagtgggaca

SEQ ID NO: 2985 - DNA, 19 bp, Homo sapiens
gtcccactattgtattttg

SEQ ID NO: 2986 - DNA, 19 bp, Homo sapiens
caaaatacaatagtgggac

SEQ ID NO: 2987 - DNA, 19 bp, Homo sapiens
tcccactattgtattttgg

SEQ ID NO: 2988 - DNA, 19 bp, Homo sapiens
ccaaaatacaatagtggga

SEQ ID NO: 2989 - DNA, 19 bp, Homo sapiens
cccactattgtattttgga

SEQ ID NO: 2990 - DNA, 19 bp, Homo sapiens
tccaaaatacaatagtggg

SEQ ID NO: 2991 - DNA, 19 bp, Homo sapiens
ccactattgtattttggaa

SEQ ID NO: 2992 - DNA, 19 bp, Homo sapiens
ttccaaaatacaatagtgg

SEQ ID NO: 2993 - DNA, 19 bp, Homo sapiens
cactattgtattttggaag

SEQ ID NO: 2994 - DNA, 19 bp, Homo sapiens
cttccaaaatacaatagtg

SEQ ID NO: 2995 - DNA, 19 bp, Homo sapiens
actattgtattttggaagc

SEQ ID NO: 2996 - DNA, 19 bp, Homo sapiens
gcttccaaaatacaatagt

SEQ ID NO: 2997 - DNA, 19 bp, Homo sapiens
ctattgtattttggaagca

SEQ ID NO: 2998 - DNA, 19 bp, Homo sapiens
tgcttccaaaatacaatag

SEQ ID NO: 2999 - DNA, 19 bp, Homo sapiens
tattgtattttggaagcac

SEQ ID NO: 3000 - DNA, 19 bp, Homo sapiens
gtgcttccaaaatacaata

SEQ ID NO: 3001 - DNA, 19 bp, Homo sapiens
attgtattttggaagcaca

SEQ ID NO: 3002 - DNA, 19 bp, Homo sapiens
tgtgcttccaaaatacaat

SEQ ID NO: 3003 - DNA, 19 bp, Homo sapiens
ttgtattttggaagcacat

SEQ ID NO: 3004 - DNA, 19 bp, Homo sapiens
atgtgcttccaaaatacaa

SEQ ID NO: 3005 - DNA, 19 bp, Homo sapiens
tgtattttggaagcacata

SEQ ID NO: 3006 - DNA, 19 bp, Homo sapiens
tatgtgcttccaaaataca

SEQ ID NO: 3007 - DNA, 19 bp, Homo sapiens
gtattttggaagcacataa

SEQ ID NO: 3008 - DNA, 19 bp, Homo sapiens
ttatgtgcttccaaaatac

SEQ ID NO: 3009 - DNA, 19 bp, Homo sapiens
tattttggaagcacataac

SEQ ID NO: 3010 - DNA, 19 bp, Homo sapiens
gttatgtgcttccaaaata

SEQ ID NO: 3011 - DNA, 19 bp, Homo sapiens
attttggaagcacataact

SEQ ID NO: 3012 - DNA, 19 bp, Homo sapiens
agttatgtgcttccaaaat

SEQ ID NO: 3013 - DNA, 19 bp, Homo sapiens
ttttggaagcacataactt

SEQ ID NO: 3014 - DNA, 19 bp, Homo sapiens
aagttatgtgcttccaaaa

SEQ ID NO: 3015 - DNA, 19 bp, Homo sapiens
tttggaagcacataacttg

SEQ ID NO: 3016 - DNA, 19 bp, Homo sapiens
caagttatgtgcttccaaa

SEQ ID NO: 3017 - DNA, 19 bp, Homo sapiens
ttggaagcacataacttgt

SEQ ID NO: 3018 - DNA, 19 bp, Homo sapiens
acaagttatgtgcttccaa

SEQ ID NO: 3019 - DNA, 19 bp, Homo sapiens
tggaagcacataacttgtt

SEQ ID NO: 3020 - DNA, 19 bp, Homo sapiens
aacaagttatgtgcttcca

SEQ ID NO: 3021 - DNA, 19 bp, Homo sapiens
ggaagcacataacttgttt

SEQ ID NO: 3022 - DNA, 19 bp, Homo sapiens
aaacaagttatgtgcttcc

SEQ ID NO: 3023 - DNA, 19 bp, Homo sapiens
gaagcacataacttgtttg

SEQ ID NO: 3024 - DNA, 19 bp, Homo sapiens
caaacaagttatgtgcttc

SEQ ID NO: 3025 - DNA, 19 bp, Homo sapiens
aagcacataacttgtttgg

SEQ ID NO: 3026 - DNA, 19 bp, Homo sapiens
ccaaacaagttatgtgctt

SEQ ID NO: 3027 - DNA, 19 bp, Homo sapiens
agcacataacttgtttggt

SEQ ID NO: 3028 - DNA, 19 bp, Homo sapiens
accaaacaagttatgtgct

SEQ ID NO: 3029 - DNA, 19 bp, Homo sapiens
gcacataacttgtttggtt

SEQ ID NO: 3030 - DNA, 19 bp, Homo sapiens
aaccaaacaagttatgtgc

SEQ ID NO: 3031 - DNA, 19 bp, Homo sapiens
cacataacttgtttggttt

SEQ ID NO: 3032 - DNA, 19 bp, Homo sapiens
aaaccaaacaagttatgtg

SEQ ID NO: 3033 - DNA, 19 bp, Homo sapiens
acataacttgtttggtttc

SEQ ID NO: 3034 - DNA, 19 bp, Homo sapiens
gaaaccaaacaagttatgt

SEQ ID NO: 3035 - DNA, 19 bp, Homo sapiens
cataacttgtttggtttca

SEQ ID NO: 3036 - DNA, 19 bp, Homo sapiens
tgaaaccaaacaagttatg

SEQ ID NO: 3037 - DNA, 19 bp, Homo sapiens
ataacttgtttggtttcac

SEQ ID NO: 3038 - DNA, 19 bp, Homo sapiens
gtgaaaccaaacaagttat

SEQ ID NO: 3039 - DNA, 19 bp, Homo sapiens
taacttgtttggtttcaca

SEQ ID NO: 3040 - DNA, 19 bp, Homo sapiens
tgtgaaaccaaacaagtta

SEQ ID NO: 3041 - DNA, 19 bp, Homo sapiens
aacttgtttggtttcacag

SEQ ID NO: 3042 - DNA, 19 bp, Homo sapiens
ctgtgaaaccaaacaagtt

SEQ ID NO: 3043 - DNA, 19 bp, Homo sapiens
acttgtttggtttcacagg

SEQ ID NO: 3044 - DNA, 19 bp, Homo sapiens
cctgtgaaaccaaacaagt

SEQ ID NO: 3045 - DNA, 19 bp, Homo sapiens
cttgtttggtttcacaggt

SEQ ID NO: 3046 - DNA, 19 bp, Homo sapiens
acctgtgaaaccaaacaag

SEQ ID NO: 3047 - DNA, 19 bp, Homo sapiens
ttgtttggtttcacaggtt

SEQ ID NO: 3048 - DNA, 19 bp, Homo sapiens
aacctgtgaaaccaaacaa

SEQ ID NO: 3049 - DNA, 19 bp, Homo sapiens
tgtttggtttcacaggttc

SEQ ID NO: 3050 - DNA, 19 bp, Homo sapiens
gaacctgtgaaaccaaaca

SEQ ID NO: 3051 - DNA, 19 bp, Homo sapiens
gtttggtttcacaggttca

SEQ ID NO: 3052 - DNA, 19 bp, Homo sapiens
tgaacctgtgaaaccaaac

SEQ ID NO: 3053 - DNA, 19 bp, Homo sapiens
tttggtttcacaggttcac

SEQ ID NO: 3054 - DNA, 19 bp, Homo sapiens
gtgaacctgtgaaaccaaa

SEQ ID NO: 3055 - DNA, 19 bp, Homo sapiens
ttggtttcacaggttcaca

SEQ ID NO: 3056 - DNA, 19 bp, Homo sapiens
tgtgaacctgtgaaaccaa

SEQ ID NO: 3057 - DNA, 19 bp, Homo sapiens
tggtttcacaggttcacag

SEQ ID NO: 3058 - DNA, 19 bp, Homo sapiens
ctgtgaacctgtgaaacca

SEQ ID NO: 3059 - DNA, 19 bp, Homo sapiens
ggtttcacaggttcacagt

SEQ ID NO: 3060 - DNA, 19 bp, Homo sapiens
actgtgaacctgtgaaacc

SEQ ID NO: 3061 - DNA, 19 bp, Homo sapiens
gtttcacaggttcacagtt

SEQ ID NO: 3062 - DNA, 19 bp, Homo sapiens
aactgtgaacctgtgaaac

SEQ ID NO: 3063 - DNA, 19 bp, Homo sapiens
tttcacaggttcacagtta

SEQ ID NO: 3064 - DNA, 19 bp, Homo sapiens
taactgtgaacctgtgaaa

SEQ ID NO: 3065 - DNA, 19 bp, Homo sapiens
ttcacaggttcacagttaa

SEQ ID NO: 3066 - DNA, 19 bp, Homo sapiens
ttaactgtgaacctgtgaa

SEQ ID NO: 3067 - DNA, 19 bp, Homo sapiens
tcacaggttcacagttaag

SEQ ID NO: 3068 - DNA, 19 bp, Homo sapiens
cttaactgtgaacctgtga

SEQ ID NO: 3069 - DNA, 19 bp, Homo sapiens
cacaggttcacagttaaga

SEQ ID NO: 3070 - DNA, 19 bp, Homo sapiens
tcttaactgtgaacctgtg

SEQ ID NO: 3071 - DNA, 19 bp, Homo sapiens
acaggttcacagttaagaa

SEQ ID NO: 3072 - DNA, 19 bp, Homo sapiens
ttcttaactgtgaacctgt

SEQ ID NO: 3073 - DNA, 19 bp, Homo sapiens
caggttcacagttaagaag

SEQ ID NO: 3074 - DNA, 19 bp, Homo sapiens
cttcttaactgtgaacctg

SEQ ID NO: 3075 - DNA, 19 bp, Homo sapiens
aggttcacagttaagaagg

SEQ ID NO: 3076 - DNA, 19 bp, Homo sapiens
ccttcttaactgtgaacct

SEQ ID NO: 3077 - DNA, 19 bp, Homo sapiens
ggttcacagttaagaagga

SEQ ID NO: 3078 - DNA, 19 bp, Homo sapiens
tccttcttaactgtgaacc

SEQ ID NO: 3079 - DNA, 19 bp, Homo sapiens
gttcacagttaagaaggaa

SEQ ID NO: 3080 - DNA, 19 bp, Homo sapiens
ttccttcttaactgtgaac

SEQ ID NO: 3081 - DNA, 19 bp, Homo sapiens
ttcacagttaagaaggaat

SEQ ID NO: 3082 - DNA, 19 bp, Homo sapiens
attccttcttaactgtgaa

SEQ ID NO: 3083 - DNA, 19 bp, Homo sapiens
tcacagttaagaaggaatt

SEQ ID NO: 3084 - DNA, 19 bp, Homo sapiens
aattccttcttaactgtga

SEQ ID NO: 3085 - DNA, 19 bp, Homo sapiens
cacagttaagaaggaattt

SEQ ID NO: 3086 - DNA, 19 bp, Homo sapiens
aaattccttcttaactgtg

SEQ ID NO: 3087 - DNA, 19 bp, Homo sapiens
acagttaagaaggaatttt

SEQ ID NO: 3088 - DNA, 19 bp, Homo sapiens
aaaattccttcttaactgt

SEQ ID NO: 3089 - DNA, 19 bp, Homo sapiens
cagttaagaaggaattttg

SEQ ID NO: 3090 - DNA, 19 bp, Homo sapiens
caaaattccttcttaactg

SEQ ID NO: 3091 - DNA, 19 bp, Homo sapiens
agttaagaaggaattttgc

SEQ ID NO: 3092 - DNA, 19 bp, Homo sapiens
gcaaaattccttcttaact

SEQ ID NO: 3093 - DNA, 19 bp, Homo sapiens
gttaagaaggaattttgcc

SEQ ID NO: 3094 - DNA, 19 bp, Homo sapiens
ggcaaaattccttcttaac

SEQ ID NO: 3095 - DNA, 19 bp, Homo sapiens
ttaagaaggaattttgcct

SEQ ID NO: 3096 - DNA, 19 bp, Homo sapiens
aggcaaaattccttcttaa

SEQ ID NO: 3097 - DNA, 19 bp, Homo sapiens
taagaaggaattttgcctc

SEQ ID NO: 3098 - DNA, 19 bp, Homo sapiens
gaggcaaaattccttctta

SEQ ID NO: 3099 - DNA, 19 bp, Homo sapiens
aagaaggaattttgcctct

SEQ ID NO: 3100 - DNA, 19 bp, Homo sapiens
agaggcaaaattccttctt

SEQ ID NO: 3101 - DNA, 19 bp, Homo sapiens
agaaggaattttgcctctg

SEQ ID NO: 3102 - DNA, 19 bp, Homo sapiens
cagaggcaaaattccttct

SEQ ID NO: 3103 - DNA, 19 bp, Homo sapiens
gaaggaattttgcctctga

SEQ ID NO: 3104 - DNA, 19 bp, Homo sapiens
tcagaggcaaaattccttc

SEQ ID NO: 3105 - DNA, 19 bp, Homo sapiens
aaggaattttgcctctgaa

SEQ ID NO: 3106 - DNA, 19 bp, Homo sapiens
ttcagaggcaaaattcctt

SEQ ID NO: 3107 - DNA, 19 bp, Homo sapiens
aggaattttgcctctgaat

SEQ ID NO: 3108 - DNA, 19 bp, Homo sapiens
attcagaggcaaaattcct

SEQ ID NO: 3109 - DNA, 19 bp, Homo sapiens
ggaattttgcctctgaata

SEQ ID NO: 3110 - DNA, 19 bp, Homo sapiens
tattcagaggcaaaattcc

SEQ ID NO: 3111 - DNA, 19 bp, Homo sapiens
gaattttgcctctgaataa

SEQ ID NO: 3112 - DNA, 19 bp, Homo sapiens
ttattcagaggcaaaattc

SEQ ID NO: 3113 - DNA, 19 bp, Homo sapiens
aattttgcctctgaataaa

SEQ ID NO: 3114 - DNA, 19 bp, Homo sapiens
tttattcagaggcaaaatt

SEQ ID NO: 3115 - DNA, 19 bp, Homo sapiens
attttgcctctgaataaat

SEQ ID NO: 3116 - DNA, 19 bp, Homo sapiens
atttattcagaggcaaaat

SEQ ID NO: 3117 - DNA, 19 bp, Homo sapiens
ttttgcctctgaataaata

SEQ ID NO: 3118 - DNA, 19 bp, Homo sapiens
tatttattcagaggcaaaa

SEQ ID NO: 3119 - DNA, 19 bp, Homo sapiens
tttgcctctgaataaatag

SEQ ID NO: 3120 - DNA, 19 bp, Homo sapiens
ctatttattcagaggcaaa

SEQ ID NO: 3121 - DNA, 19 bp, Homo sapiens
ttgcctctgaataaataga

SEQ ID NO: 3122 - DNA, 19 bp, Homo sapiens
tctatttattcagaggcaa

SEQ ID NO: 3123 - DNA, 19 bp, Homo sapiens
tgcctctgaataaatagaa

SEQ ID NO: 3124 - DNA, 19 bp, Homo sapiens
ttctatttattcagaggca

SEQ ID NO: 3125 - DNA, 19 bp, Homo sapiens
gcctctgaataaatagaat

SEQ ID NO: 3126 - DNA, 19 bp, Homo sapiens
attctatttattcagaggc

SEQ ID NO: 3127 - DNA, 19 bp, Homo sapiens
cctctgaataaatagaatc

SEQ ID NO: 3128 - DNA, 19 bp, Homo sapiens
gattctatttattcagagg

SEQ ID NO: 3129 - DNA, 19 bp, Homo sapiens
ctctgaataaatagaatct

SEQ ID NO: 3130 - DNA, 19 bp, Homo sapiens
agattctatttattcagag

SEQ ID NO: 3131 - DNA, 19 bp, Homo sapiens
tctgaataaatagaatctt

SEQ ID NO: 3132 - DNA, 19 bp, Homo sapiens
aagattctatttattcaga

SEQ ID NO: 3133 - DNA, 19 bp, Homo sapiens
ctgaataaatagaatcttg

SEQ ID NO: 3134 - DNA, 19 bp, Homo sapiens
caagattctatttattcag

SEQ ID NO: 3135 - DNA, 19 bp, Homo sapiens
tgaataaatagaatcttga

SEQ ID NO: 3136 - DNA, 19 bp, Homo sapiens
tcaagattctatttattca

SEQ ID NO: 3137 - DNA, 19 bp, Homo sapiens
gaataaatagaatcttgag

SEQ ID NO: 3138 - DNA, 19 bp, Homo sapiens
ctcaagattctatttattc

SEQ ID NO: 3139 - DNA, 19 bp, Homo sapiens
aataaatagaatcttgagt

SEQ ID NO: 3140 - DNA, 19 bp, Homo sapiens
actcaagattctatttatt

SEQ ID NO: 3141 - DNA, 19 bp, Homo sapiens
ataaatagaatcttgagtc

SEQ ID NO: 3142 - DNA, 19 bp, Homo sapiens
gactcaagattctatttat

SEQ ID NO: 3143 - DNA, 19 bp, Homo sapiens
taaatagaatcttgagtct

SEQ ID NO: 3144 - DNA, 19 bp, Homo sapiens
agactcaagattctattta

SEQ ID NO: 3145 - DNA, 19 bp, Homo sapiens
aaatagaatcttgagtctc

SEQ ID NO: 3146 - DNA, 19 bp, Homo sapiens
gagactcaagattctattt

SEQ ID NO: 3147 - DNA, 19 bp, Homo sapiens
aatagaatcttgagtctca

SEQ ID NO: 3148 - DNA, 19 bp, Homo sapiens
tgagactcaagattctatt

SEQ ID NO: 3149 - DNA, 19 bp, Homo sapiens
atagaatcttgagtctcat

SEQ ID NO: 3150 - DNA, 19 bp, Homo sapiens
atgagactcaagattctat

SEQ ID NO: 3151 - DNA, 19 bp, Homo sapiens
tagaatcttgagtctcatg

SEQ ID NO: 3152 - DNA, 19 bp, Homo sapiens
catgagactcaagattcta

SEQ ID NO: 3153 - DNA, 19 bp, Homo sapiens
agaatcttgagtctcatgc

SEQ ID NO: 3154 - DNA, 19 bp, Homo sapiens
gcatgagactcaagattct

SEQ ID NO: 3155 - DNA, 19 bp, Homo sapiens
gatttcatcttccaggatc

SEQ ID NO: 3156 - DNA, 19 bp, Homo sapiens
gatcctggaagatgaaatc

SEQ ID NO: 3157 - DNA, 19 bp, Homo sapiens
atttcatcttccaggatcc

SEQ ID NO: 3158 - DNA, 19 bp, Homo sapiens
ggatcctggaagatgaaat

SEQ ID NO: 3159 - DNA, 19 bp, Homo sapiens
tttcatcttccaggatcca

SEQ ID NO: 3160 - DNA, 19 bp, Homo sapiens
tggatcctggaagatgaaa

SEQ ID NO: 3161 - DNA, 19 bp, Homo sapiens
ttcatcttccaggatccac

SEQ ID NO: 3162 - DNA, 19 bp, Homo sapiens
gtggatcctggaagatgaa

SEQ ID NO: 3163 - DNA, 19 bp, Homo sapiens
tcatcttccaggatccacc

SEQ ID NO: 3164 - DNA, 19 bp, Homo sapiens
ggtggatcctggaagatga

SEQ ID NO: 3165 - DNA, 19 bp, Homo sapiens
catcttccaggatccacct

SEQ ID NO: 3166 - DNA, 19 bp, Homo sapiens
aggtggatcctggaagatg

SEQ ID NO: 3167 - DNA, 19 bp, Homo sapiens
atcttccaggatccacctt

SEQ ID NO: 3168 - DNA, 19 bp, Homo sapiens
aaggtggatcctggaagat

SEQ ID NO: 3169 - DNA, 19 bp, Homo sapiens
tcttccaggatccaccttg

SEQ ID NO: 3170 - DNA, 19 bp, Homo sapiens
caaggtggatcctggaaga

SEQ ID NO: 3171 - DNA, 19 bp, Homo sapiens
cttccaggatccaccttga

SEQ ID NO: 3172 - DNA, 19 bp, Homo sapiens
tcaaggtggatcctggaag

SEQ ID NO: 3173 - DNA, 19 bp, Homo sapiens
ttccaggatccaccttgat

SEQ ID NO: 3174 - DNA, 19 bp, Homo sapiens
atcaaggtggatcctggaa

SEQ ID NO: 3175 - DNA, 19 bp, Homo sapiens
tccaggatccaccttgatt

SEQ ID NO: 3176 - DNA, 19 bp, Homo sapiens
aatcaaggtggatcctgga

SEQ ID NO: 3177 - DNA, 19 bp, Homo sapiens
ccaggatccaccttgatta

SEQ ID NO: 3178 - DNA, 19 bp, Homo sapiens
taatcaaggtggatcctgg

SEQ ID NO: 3179 - DNA, 19 bp, Homo sapiens
caggatccaccttgattaa

SEQ ID NO: 3180 - DNA, 19 bp, Homo sapiens
ttaatcaaggtggatcctg

SEQ ID NO: 3181 - DNA, 19 bp, Homo sapiens
aggatccaccttgattaaa

SEQ ID NO: 3182 - DNA, 19 bp, Homo sapiens
tttaatcaaggtggatcct

SEQ ID NO: 3183 - DNA, 19 bp, Homo sapiens
ggatccaccttgattaaat

SEQ ID NO: 3184 - DNA, 19 bp, Homo sapiens
atttaatcaaggtggatcc

SEQ ID NO: 3185 - DNA, 19 bp, Homo sapiens
gatccaccttgattaaatc

SEQ ID NO: 3186 - DNA, 19 bp, Homo sapiens
gatttaatcaaggtggatc

SEQ ID NO: 3187 - DNA, 19 bp, Homo sapiens
atccaccttgattaaatct

SEQ ID NO: 3188 - DNA, 19 bp, Homo sapiens
agatttaatcaaggtggat

SEQ ID NO: 3189 - DNA, 19 bp, Homo sapiens
tccaccttgattaaatctc

SEQ ID NO: 3190 - DNA, 19 bp, Homo sapiens
gagatttaatcaaggtgga

SEQ ID NO: 3191 - DNA, 19 bp, Homo sapiens
ccaccttgattaaatctct

SEQ ID NO: 3192 - DNA, 19 bp, Homo sapiens
agagatttaatcaaggtgg

SEQ ID NO: 3193 - DNA, 19 bp, Homo sapiens
caccttgattaaatctctt

SEQ ID NO: 3194 - DNA, 19 bp, Homo sapiens
aagagatttaatcaaggtg

SEQ ID NO: 3195 - DNA, 19 bp, Homo sapiens
accttgattaaatctcttg

SEQ ID NO: 3196 - DNA, 19 bp, Homo sapiens
caagagatttaatcaaggt

SEQ ID NO: 3197 - DNA, 19 bp, Homo sapiens
ccttgattaaatctcttgt

SEQ ID NO: 3198 - DNA, 19 bp, Homo sapiens
acaagagatttaatcaagg

SEQ ID NO: 3199 - DNA, 19 bp, Homo sapiens
cttgattaaatctcttgtc

SEQ ID NO: 3200 - DNA, 19 bp, Homo sapiens
gacaagagatttaatcaag

SEQ ID NO: 3201 - DNA, 19 bp, Homo sapiens
ttgattaaatctcttgtcc

SEQ ID NO: 3202 - DNA, 19 bp, Homo sapiens
ggacaagagatttaatcaa

SEQ ID NO: 3203 - DNA, 19 bp, Homo sapiens
tgattaaatctcttgtccc

SEQ ID NO: 3204 - DNA, 19 bp, Homo sapiens
gggacaagagatttaatca

SEQ ID NO: 3205 - DNA, 19 bp, Homo sapiens
gattaaatctcttgtcccc

SEQ ID NO: 3206 - DNA, 19 bp, Homo sapiens
ggggacaagagatttaatc

SEQ ID NO: 3207 - DNA, 19 bp, Homo sapiens
attaaatctcttgtcccca

SEQ ID NO: 3208 - DNA, 19 bp, Homo sapiens
tggggacaagagatttaat

SEQ ID NO: 3209 - DNA, 19 bp, Homo sapiens
ttaaatctcttgtccccag

SEQ ID NO: 3210 - DNA, 19 bp, Homo sapiens
ctggggacaagagatttaa

SEQ ID NO: 3211 - DNA, 19 bp, Homo sapiens
taaatctcttgtccccagc

SEQ ID NO: 3212 - DNA, 19 bp, Homo sapiens
gctggggacaagagattta

SEQ ID NO: 3213 - DNA, 19 bp, Homo sapiens
aaatctcttgtccccagcc

SEQ ID NO: 3214 - DNA, 19 bp, Homo sapiens
ggctggggacaagagattt

SEQ ID NO: 3215 - DNA, 19 bp, Homo sapiens
aatctcttgtccccagccc

SEQ ID NO: 3216 - DNA, 19 bp, Homo sapiens
gggctggggacaagagatt

SEQ ID NO: 3217 - DNA, 19 bp, Homo sapiens
atctcttgtccccagccct

SEQ ID NO: 3218 - DNA, 19 bp, Homo sapiens
agggctggggacaagagat

SEQ ID NO: 3219 - DNA, 19 bp, Homo sapiens
tctcttgtccccagccctc

SEQ ID NO: 3220 - DNA, 19 bp, Homo sapiens
gagggctggggacaagaga

SEQ ID NO: 3221 - DNA, 19 bp, Homo sapiens
ctcttgtccccagccctcc

SEQ ID NO: 3222 - DNA, 19 bp, Homo sapiens
ggagggctggggacaagag

SEQ ID NO: 3223 - DNA, 19 bp, Homo sapiens
tcttgtccccagccctcct

SEQ ID NO: 3224 - DNA, 19 bp, Homo sapiens
aggagggctggggacaaga

SEQ ID NO: 3225 - DNA, 19 bp, Homo sapiens
cttgtccccagccctcctg

SEQ ID NO: 3226 - DNA, 19 bp, Homo sapiens
caggagggctggggacaag

SEQ ID NO: 3227 - DNA, 19 bp, Homo sapiens
ttgtccccagccctcctgg

SEQ ID NO: 3228 - DNA, 19 bp, Homo sapiens
ccaggagggctggggacaa

SEQ ID NO: 3229 - DNA, 19 bp, Homo sapiens
tgtccccagccctcctggt

SEQ ID NO: 3230 - DNA, 19 bp, Homo sapiens
accaggagggctggggaca

SEQ ID NO: 3231 - DNA, 19 bp, Homo sapiens
gtccccagccctcctggtc

SEQ ID NO: 3232 - DNA, 19 bp, Homo sapiens
gaccaggagggctggggac

SEQ ID NO: 3233 - DNA, 19 bp, Homo sapiens
tccccagccctcctggtcc

SEQ ID NO: 3234 - DNA, 19 bp, Homo sapiens
ggaccaggagggctgggga

SEQ ID NO: 3235 - DNA, 19 bp, Homo sapiens
ccccagccctcctggtccc

SEQ ID NO: 3236 - DNA, 19 bp, Homo sapiens
gggaccaggagggctgggg

SEQ ID NO: 3237 - DNA, 19 bp, Homo sapiens
cccagccctcctggtcccc

SEQ ID NO: 3238 - DNA, 19 bp, Homo sapiens
ggggaccaggagggctggg

SEQ ID NO: 3239 - DNA, 19 bp, Homo sapiens
ccagccctcctggtcccca

SEQ ID NO: 3240 - DNA, 19 bp, Homo sapiens
tggggaccaggagggctgg

SEQ ID NO: 3241 - DNA, 19 bp, Homo sapiens
cagccctcctggtccccaa

SEQ ID NO: 3242 - DNA, 19 bp, Homo sapiens
ttggggaccaggagggctg

SEQ ID NO: 3243 - DNA, 19 bp, Homo sapiens
agccctcctggtccccaat

SEQ ID NO: 3244 - DNA, 19 bp, Homo sapiens
attggggaccaggagggct

SEQ ID NO: 3245 - DNA, 19 bp, Homo sapiens
gccctcctggtccccaatg

SEQ ID NO: 3246 - DNA, 19 bp, Homo sapiens
cattggggaccaggagggc

SEQ ID NO: 3247 - DNA, 19 bp, Homo sapiens
ccctcctggtccccaatgg

SEQ ID NO: 3248 - DNA, 19 bp, Homo sapiens
ccattggggaccaggaggg

SEQ ID NO: 3249 - DNA, 19 bp, Homo sapiens
cctcctggtccccaatggc

SEQ ID NO: 3250 - DNA, 19 bp, Homo sapiens
gccattggggaccaggagg

SEQ ID NO: 3251 - DNA, 19 bp, Homo sapiens
ctcctggtccccaatggca

SEQ ID NO: 3252 - DNA, 19 bp, Homo sapiens
tgccattggggaccaggag

SEQ ID NO: 3253 - DNA, 19 bp, Homo sapiens
tcctggtccccaatggcag

SEQ ID NO: 3254 - DNA, 19 bp, Homo sapiens
ctgccattggggaccagga

SEQ ID NO: 3255 - DNA, 19 bp, Homo sapiens
cctggtccccaatggcagc

SEQ ID NO: 3256 - DNA, 19 bp, Homo sapiens
gctgccattggggaccagg

SEQ ID NO: 3257 - DNA, 19 bp, Homo sapiens
ctggtccccaatggcagca

SEQ ID NO: 3258 - DNA, 19 bp, Homo sapiens
tgctgccattggggaccag

SEQ ID NO: 3259 - DNA, 19 bp, Homo sapiens
tggtccccaatggcagcag

SEQ ID NO: 3260 - DNA, 19 bp, Homo sapiens
ctgctgccattggggacca

SEQ ID NO: 3261 - DNA, 19 bp, Homo sapiens
ggtccccaatggcagcagc

SEQ ID NO: 3262 - DNA, 19 bp, Homo sapiens
gctgctgccattggggacc

SEQ ID NO: 3263 - DNA, 19 bp, Homo sapiens
gtccccaatggcagcagcc

SEQ ID NO: 3264 - DNA, 19 bp, Homo sapiens
ggctgctgccattggggac

SEQ ID NO: 3265 - DNA, 19 bp, Homo sapiens
tccccaatggcagcagccg

SEQ ID NO: 3266 - DNA, 19 bp, Homo sapiens
cggctgctgccattgggga

SEQ ID NO: 3267 - DNA, 19 bp, Homo sapiens
ccccaatggcagcagccgc

SEQ ID NO: 3268 - DNA, 19 bp, Homo sapiens
gcggctgctgccattgggg

SEQ ID NO: 3269 - DNA, 19 bp, Homo sapiens
cccaatggcagcagccgcc

SEQ ID NO: 3270 - DNA, 19 bp, Homo sapiens
ggcggctgctgccattggg

SEQ ID NO: 3271 - DNA, 19 bp, Homo sapiens
ccaatggcagcagccgcca

SEQ ID NO: 3272 - DNA, 19 bp, Homo sapiens
tggcggctgctgccattgg

SEQ ID NO: 3273 - DNA, 19 bp, Homo sapiens
caatggcagcagccgccat

SEQ ID NO: 3274 - DNA, 19 bp, Homo sapiens
atggcggctgctgccattg

SEQ ID NO: 3275 - DNA, 19 bp, Homo sapiens
aatggcagcagccgccatc

SEQ ID NO: 3276 - DNA, 19 bp, Homo sapiens
gatggcggctgctgccatt

SEQ ID NO: 3277 - DNA, 19 bp, Homo sapiens
atggcagcagccgccatcc

SEQ ID NO: 3278 - DNA, 19 bp, Homo sapiens
ggatggcggctgctgccat

SEQ ID NO: 3279 - DNA, 19 bp, Homo sapiens
tggcagcagccgccatccc

SEQ ID NO: 3280 - DNA, 19 bp, Homo sapiens
gggatggcggctgctgcca

SEQ ID NO: 3281 - DNA, 19 bp, Homo sapiens
ggcagcagccgccatccca

SEQ ID NO: 3282 - DNA, 19 bp, Homo sapiens
tgggatggcggctgctgcc

SEQ ID NO: 3283 - DNA, 19 bp, Homo sapiens
gcagcagccgccatcccag

SEQ ID NO: 3284 - DNA, 19 bp, Homo sapiens
ctgggatggcggctgctgc

SEQ ID NO: 3285 - DNA, 19 bp, Homo sapiens
cagcagccgccatcccagc

SEQ ID NO: 3286 - DNA, 19 bp, Homo sapiens
gctgggatggcggctgctg

SEQ ID NO: 3287 - DNA, 19 bp, Homo sapiens
agcagccgccatcccagct

SEQ ID NO: 3288 - DNA, 19 bp, Homo sapiens
agctgggatggcggctgct

SEQ ID NO: 3289 - DNA, 19 bp, Homo sapiens
gcagccgccatcccagctt

SEQ ID NO: 3290 - DNA, 19 bp, Homo sapiens
aagctgggatggcggctgc

SEQ ID NO: 3291 - DNA, 19 bp, Homo sapiens
cagccgccatcccagcttt

SEQ ID NO: 3292 - DNA, 19 bp, Homo sapiens
aaagctgggatggcggctg

SEQ ID NO: 3293 - DNA, 19 bp, Homo sapiens
agccgccatcccagctttg

SEQ ID NO: 3294 - DNA, 19 bp, Homo sapiens
caaagctgggatggcggct

SEQ ID NO: 3295 - DNA, 19 bp, Homo sapiens
gccgccatcccagctttgc

SEQ ID NO: 3296 - DNA, 19 bp, Homo sapiens
gcaaagctgggatggcggc

SEQ ID NO: 3297 - DNA, 19 bp, Homo sapiens
ccgccatcccagctttgct

SEQ ID NO: 3298 - DNA, 19 bp, Homo sapiens
agcaaagctgggatggcgg

SEQ ID NO: 3299 - DNA, 19 bp, Homo sapiens
cgccatcccagctttgctt

SEQ ID NO: 3300 - DNA, 19 bp, Homo sapiens
aagcaaagctgggatggcg

SEQ ID NO: 3301 - DNA, 19 bp, Homo sapiens
gccatcccagctttgcttc

SEQ ID NO: 3302 - DNA, 19 bp, Homo sapiens
gaagcaaagctgggatggc

SEQ ID NO: 3303 - DNA, 19 bp, Homo sapiens
ccatcccagctttgcttct

SEQ ID NO: 3304 - DNA, 19 bp, Homo sapiens
agaagcaaagctgggatgg

SEQ ID NO: 3305 - DNA, 19 bp, Homo sapiens
catcccagctttgcttctg

SEQ ID NO: 3306 - DNA, 19 bp, Homo sapiens
cagaagcaaagctgggatg

SEQ ID NO: 3307 - DNA, 19 bp, Homo sapiens
atcccagctttgcttctgt

SEQ ID NO: 3308 - DNA, 19 bp, Homo sapiens
acagaagcaaagctgggat

SEQ ID NO: 3309 - DNA, 19 bp, Homo sapiens
tcccagctttgcttctgtg

SEQ ID NO: 3310 - DNA, 19 bp, Homo sapiens
cacagaagcaaagctggga

SEQ ID NO: 3311 - DNA, 19 bp, Homo sapiens
cccagctttgcttctgtgc

SEQ ID NO: 3312 - DNA, 19 bp, Homo sapiens
gcacagaagcaaagctggg

SEQ ID NO: 3313 - DNA, 19 bp, Homo sapiens
ccagctttgcttctgtgcc

SEQ ID NO: 3314 - DNA, 19 bp, Homo sapiens
ggcacagaagcaaagctgg

SEQ ID NO: 3315 - DNA, 19 bp, Homo sapiens
cagctttgcttctgtgcct

SEQ ID NO: 3316 - DNA, 19 bp, Homo sapiens
aggcacagaagcaaagctg

SEQ ID NO: 3317 - DNA, 19 bp, Homo sapiens
agctttgcttctgtgcctc

SEQ ID NO: 3318 - DNA, 19 bp, Homo sapiens
gaggcacagaagcaaagct

SEQ ID NO: 3319 - DNA, 19 bp, Homo sapiens
gctttgcttctgtgcctcc

SEQ ID NO: 3320 - DNA, 19 bp, Homo sapiens
ggaggcacagaagcaaagc

SEQ ID NO: 3321 - DNA, 19 bp, Homo sapiens
ctttgcttctgtgcctccc

SEQ ID NO: 3322 - DNA, 19 bp, Homo sapiens
gggaggcacagaagcaaag

SEQ ID NO: 3323 - DNA, 19 bp, Homo sapiens
tttgcttctgtgcctcccg

SEQ ID NO: 3324 - DNA, 19 bp, Homo sapiens
cgggaggcacagaagcaaa

SEQ ID NO: 3325 - DNA, 19 bp, Homo sapiens
ttgcttctgtgcctcccgc

SEQ ID NO: 3326 - DNA, 19 bp, Homo sapiens
gcgggaggcacagaagcaa

SEQ ID NO: 3327 - DNA, 19 bp, Homo sapiens
tgcttctgtgcctcccgct

SEQ ID NO: 3328 - DNA, 19 bp, Homo sapiens
agcgggaggcacagaagca

SEQ ID NO: 3329 - DNA, 19 bp, Homo sapiens
gcttctgtgcctcccgctt

SEQ ID NO: 3330 - DNA, 19 bp, Homo sapiens
aagcgggaggcacagaagc

SEQ ID NO: 3331 - DNA, 19 bp, Homo sapiens
cttctgtgcctcccgcttc

SEQ ID NO: 3332 - DNA, 19 bp, Homo sapiens
gaagcgggaggcacagaag

SEQ ID NO: 3333 - DNA, 19 bp, Homo sapiens
ttctgtgcctcccgcttct

SEQ ID NO: 3334 - DNA, 19 bp, Homo sapiens
agaagcgggaggcacagaa

SEQ ID NO: 3335 - DNA, 19 bp, Homo sapiens
tctgtgcctcccgcttctg

SEQ ID NO: 3336 - DNA, 19 bp, Homo sapiens
cagaagcgggaggcacaga

SEQ ID NO: 3337 - DNA, 19 bp, Homo sapiens
ctgtgcctcccgcttctgt

SEQ ID NO: 3338 - DNA, 19 bp, Homo sapiens
acagaagcgggaggcacag

SEQ ID NO: 3339 - DNA, 19 bp, Homo sapiens
tgtgcctcccgcttctgtt

SEQ ID NO: 3340 - DNA, 19 bp, Homo sapiens
aacagaagcgggaggcaca

SEQ ID NO: 3341 - DNA, 19 bp, Homo sapiens
gtgcctcccgcttctgttc

SEQ ID NO: 3342 - DNA, 19 bp, Homo sapiens
gaacagaagcgggaggcac

SEQ ID NO: 3343 - DNA, 19 bp, Homo sapiens
tgcctcccgcttctgttcc

SEQ ID NO: 3344 - DNA, 19 bp, Homo sapiens
ggaacagaagcgggaggca

SEQ ID NO: 3345 - DNA, 19 bp, Homo sapiens
gcctcccgcttctgttcct

SEQ ID NO: 3346 - DNA, 19 bp, Homo sapiens
aggaacagaagcgggaggc

SEQ ID NO: 3347 - DNA, 19 bp, Homo sapiens
cctcccgcttctgttcctg

SEQ ID NO: 3348 - DNA, 19 bp, Homo sapiens
caggaacagaagcgggagg

SEQ ID NO: 3349 - DNA, 19 bp, Homo sapiens
ctcccgcttctgttcctgc

SEQ ID NO: 3350 - DNA, 19 bp, Homo sapiens
gcaggaacagaagcgggag

SEQ ID NO: 3351 - DNA, 19 bp, Homo sapiens
tcccgcttctgttcctgct

SEQ ID NO: 3352 - DNA, 19 bp, Homo sapiens
agcaggaacagaagcggga

SEQ ID NO: 3353 - DNA, 19 bp, Homo sapiens
cccgcttctgttcctgctg

SEQ ID NO: 3354 - DNA, 19 bp, Homo sapiens
cagcaggaacagaagcggg

SEQ ID NO: 3355 - DNA, 19 bp, Homo sapiens
ccgcttctgttcctgctgt

SEQ ID NO: 3356 - DNA, 19 bp, Homo sapiens
acagcaggaacagaagcgg

SEQ ID NO: 3357 - DNA, 19 bp, Homo sapiens
cgcttctgttcctgctgtt

SEQ ID NO: 3358 - DNA, 19 bp, Homo sapiens
aacagcaggaacagaagcg

SEQ ID NO: 3359 - DNA, 19 bp, Homo sapiens
gcttctgttcctgctgttc

SEQ ID NO: 3360 - DNA, 19 bp, Homo sapiens
gaacagcaggaacagaagc

SEQ ID NO: 3361 - DNA, 19 bp, Homo sapiens
cttctgttcctgctgttcg

SEQ ID NO: 3362 - DNA, 19 bp, Homo sapiens
cgaacagcaggaacagaag

SEQ ID NO: 3363 - DNA, 19 bp, Homo sapiens
ttctgttcctgctgttcgg

SEQ ID NO: 3364 - DNA, 19 bp, Homo sapiens
ccgaacagcaggaacagaa

SEQ ID NO: 3365 - DNA, 19 bp, Homo sapiens
tctgttcctgctgttcggc

SEQ ID NO: 3366 - DNA, 19 bp, Homo sapiens
gccgaacagcaggaacaga

SEQ ID NO: 3367 - DNA, 19 bp, Homo sapiens
ctgttcctgctgttcggct

SEQ ID NO: 3368 - DNA, 19 bp, Homo sapiens
agccgaacagcaggaacag

SEQ ID NO: 3369 - DNA, 19 bp, Homo sapiens
tgttcctgctgttcggctg

SEQ ID NO: 3370 - DNA, 19 bp, Homo sapiens
cagccgaacagcaggaaca

SEQ ID NO: 3371 - DNA, 19 bp, Homo sapiens
gttcctgctgttcggctgg

SEQ ID NO: 3372 - DNA, 19 bp, Homo sapiens
ccagccgaacagcaggaac

SEQ ID NO: 3373 - DNA, 19 bp, Homo sapiens
ttcctgctgttcggctggt

SEQ ID NO: 3374 - DNA, 19 bp, Homo sapiens
accagccgaacagcaggaa

SEQ ID NO: 3375 - DNA, 19 bp, Homo sapiens
tcctgctgttcggctggtc

SEQ ID NO: 3376 - DNA, 19 bp, Homo sapiens
gaccagccgaacagcagga

SEQ ID NO: 3377 - DNA, 19 bp, Homo sapiens
cctgctgttcggctggtcc

SEQ ID NO: 3378 - DNA, 19 bp, Homo sapiens
ggaccagccgaacagcagg

SEQ ID NO: 3379 - DNA, 19 bp, Homo sapiens
ctgctgttcggctggtccc

SEQ ID NO: 3380 - DNA, 19 bp, Homo sapiens
gggaccagccgaacagcag

SEQ ID NO: 3381 - DNA, 19 bp, Homo sapiens
tgctgttcggctggtcccg

SEQ ID NO: 3382 - DNA, 19 bp, Homo sapiens
cgggaccagccgaacagca

SEQ ID NO: 3383 - DNA, 19 bp, Homo sapiens
gctgttcggctggtcccgg

SEQ ID NO: 3384 - DNA, 19 bp, Homo sapiens
ccgggaccagccgaacagc

SEQ ID NO: 3385 - DNA, 19 bp, Homo sapiens
ctgttcggctggtcccggg

SEQ ID NO: 3386 - DNA, 19 bp, Homo sapiens
cccgggaccagccgaacag

SEQ ID NO: 3387 - DNA, 19 bp, Homo sapiens
tgttcggctggtcccgggc

SEQ ID NO: 3388 - DNA, 19 bp, Homo sapiens
gcccgggaccagccgaaca

SEQ ID NO: 3389 - DNA, 19 bp, Homo sapiens
gttcggctggtcccgggct

SEQ ID NO: 3390 - DNA, 19 bp, Homo sapiens
agcccgggaccagccgaac

SEQ ID NO: 3391 - DNA, 19 bp, Homo sapiens
ttcggctggtcccgggcta

SEQ ID NO: 3392 - DNA, 19 bp, Homo sapiens
tagcccgggaccagccgaa

SEQ ID NO: 3393 - DNA, 19 bp, Homo sapiens
tcggctggtcccgggctag

SEQ ID NO: 3394 - DNA, 19 bp, Homo sapiens
ctagcccgggaccagccga

SEQ ID NO: 3395 - DNA, 19 bp, Homo sapiens
cggctggtcccgggctagg

SEQ ID NO: 3396 - DNA, 19 bp, Homo sapiens
cctagcccgggaccagccg

SEQ ID NO: 3397 - DNA, 19 bp, Homo sapiens
ggctggtcccgggctaggc

SEQ ID NO: 3398 - DNA, 19 bp, Homo sapiens
gcctagcccgggaccagcc

SEQ ID NO: 3399 - DNA, 19 bp, Homo sapiens
gctggtcccgggctaggcg

SEQ ID NO: 3400 - DNA, 19 bp, Homo sapiens
cgcctagcccgggaccagc

SEQ ID NO: 3401 - DNA, 19 bp, Homo sapiens
ctggtcccgggctaggcga

SEQ ID NO: 3402 - DNA, 19 bp, Homo sapiens
tcgcctagcccgggaccag

SEQ ID NO: 3403 - DNA, 19 bp, Homo sapiens
tggtcccgggctaggcgag

SEQ ID NO: 3404 - DNA, 19 bp, Homo sapiens
ctcgcctagcccgggacca

SEQ ID NO: 3405 - DNA, 19 bp, Homo sapiens
ggtcccgggctaggcgaga

SEQ ID NO: 3406 - DNA, 19 bp, Homo sapiens
tctcgcctagcccgggacc

SEQ ID NO: 3407 - DNA, 19 bp, Homo sapiens
gtcccgggctaggcgagac

SEQ ID NO: 3408 - DNA, 19 bp, Homo sapiens
gtctcgcctagcccgggac

SEQ ID NO: 3409 - DNA, 19 bp, Homo sapiens
tcccgggctaggcgagacg

SEQ ID NO: 3410 - DNA, 19 bp, Homo sapiens
cgtctcgcctagcccggga

SEQ ID NO: 3411 - DNA, 19 bp, Homo sapiens
cccgggctaggcgagacga

SEQ ID NO: 3412 - DNA, 19 bp, Homo sapiens
tcgtctcgcctagcccggg

SEQ ID NO: 3413 - DNA, 19 bp, Homo sapiens
ccgggctaggcgagacgac

SEQ ID NO: 3414 - DNA, 19 bp, Homo sapiens
gtcgtctcgcctagcccgg

SEQ ID NO: 3415 - DNA, 19 bp, Homo sapiens
cgggctaggcgagacgacc

SEQ ID NO: 3416 - DNA, 19 bp, Homo sapiens
ggtcgtctcgcctagcccg

SEQ ID NO: 3417 - DNA, 19 bp, Homo sapiens
gggctaggcgagacgaccc

SEQ ID NO: 3418 - DNA, 19 bp, Homo sapiens
gggtcgtctcgcctagccc

SEQ ID NO: 3419 - DNA, 19 bp, Homo sapiens
ggctaggcgagacgaccct

SEQ ID NO: 3420 - DNA, 19 bp, Homo sapiens
agggtcgtctcgcctagcc

SEQ ID NO: 3421 - DNA, 19 bp, Homo sapiens
gctaggcgagacgaccctc

SEQ ID NO: 3422 - DNA, 19 bp, Homo sapiens
gagggtcgtctcgcctagc

SEQ ID NO: 3423 - DNA, 19 bp, Homo sapiens
ctaggcgagacgaccctca

SEQ ID NO: 3424 - DNA, 19 bp, Homo sapiens
tgagggtcgtctcgcctag

SEQ ID NO: 3425 - DNA, 19 bp, Homo sapiens
taggcgagacgaccctcac

SEQ ID NO: 3426 - DNA, 19 bp, Homo sapiens
gtgagggtcgtctcgccta

SEQ ID NO: 3427 - DNA, 19 bp, Homo sapiens
aggcgagacgaccctcact

SEQ ID NO: 3428 - DNA, 19 bp, Homo sapiens
agtgagggtcgtctcgcct

SEQ ID NO: 3429 - DNA, 19 bp, Homo sapiens
ggcgagacgaccctcactc

SEQ ID NO: 3430 - DNA, 19 bp, Homo sapiens
gagtgagggtcgtctcgcc

SEQ ID NO: 3431 - DNA, 19 bp, Homo sapiens
gcgagacgaccctcactct

SEQ ID NO: 3432 - DNA, 19 bp, Homo sapiens
agagtgagggtcgtctcgc

SEQ ID NO: 3433 - DNA, 19 bp, Homo sapiens
cgagacgaccctcactctc

SEQ ID NO: 3434 - DNA, 19 bp, Homo sapiens
gagagtgagggtcgtctcg

SEQ ID NO: 3435 - DNA, 19 bp, Homo sapiens
gagacgaccctcactctct

SEQ ID NO: 3436 - DNA, 19 bp, Homo sapiens
agagagtgagggtcgtctc

SEQ ID NO: 3437 - DNA, 19 bp, Homo sapiens
agacgaccctcactctctt

SEQ ID NO: 3438 - DNA, 19 bp, Homo sapiens
aagagagtgagggtcgtct

SEQ ID NO: 3439 - DNA, 19 bp, Homo sapiens
gacgaccctcactctcttt

SEQ ID NO: 3440 - DNA, 19 bp, Homo sapiens
aaagagagtgagggtcgtc

SEQ ID NO: 3441 - DNA, 19 bp, Homo sapiens
acgaccctcactctctttg

SEQ ID NO: 3442 - DNA, 19 bp, Homo sapiens
caaagagagtgagggtcgt

SEQ ID NO: 3443 - DNA, 19 bp, Homo sapiens
cgaccctcactctctttgc

SEQ ID NO: 3444 - DNA, 19 bp, Homo sapiens
gcaaagagagtgagggtcg

SEQ ID NO: 3445 - DNA, 19 bp, Homo sapiens
gaccctcactctctttgct

SEQ ID NO: 3446 - DNA, 19 bp, Homo sapiens
agcaaagagagtgagggtc

SEQ ID NO: 3447 - DNA, 19 bp, Homo sapiens
accctcactctctttgcta

SEQ ID NO: 3448 - DNA, 19 bp, Homo sapiens
tagcaaagagagtgagggt

SEQ ID NO: 3449 - DNA, 19 bp, Homo sapiens
ccctcactctctttgctat

SEQ ID NO: 3450 - DNA, 19 bp, Homo sapiens
atagcaaagagagtgaggg

SEQ ID NO: 3451 - DNA, 19 bp, Homo sapiens
cctcactctctttgctatg

SEQ ID NO: 3452 - DNA, 19 bp, Homo sapiens
catagcaaagagagtgagg

SEQ ID NO: 3453 - DNA, 19 bp, Homo sapiens
ctcactctctttgctatga

SEQ ID NO: 3454 - DNA, 19 bp, Homo sapiens
tcatagcaaagagagtgag

SEQ ID NO: 3455 - DNA, 19 bp, Homo sapiens
tcactctctttgctatgac

SEQ ID NO: 3456 - DNA, 19 bp, Homo sapiens
gtcatagcaaagagagtga

SEQ ID NO: 3457 - DNA, 19 bp, Homo sapiens
cactctctttgctatgaca

SEQ ID NO: 3458 - DNA, 19 bp, Homo sapiens
tgtcatagcaaagagagtg

SEQ ID NO: 3459 - DNA, 19 bp, Homo sapiens
actctctttgctatgacat

SEQ ID NO: 3460 - DNA, 19 bp, Homo sapiens
atgtcatagcaaagagagt

SEQ ID NO: 3461 - DNA, 19 bp, Homo sapiens
ctctctttgctatgacatc

SEQ ID NO: 3462 - DNA, 19 bp, Homo sapiens
gatgtcatagcaaagagag

SEQ ID NO: 3463 - DNA, 19 bp, Homo sapiens
tctctttgctatgacatca

SEQ ID NO: 3464 - DNA, 19 bp, Homo sapiens
tgatgtcatagcaaagaga

SEQ ID NO: 3465 - DNA, 19 bp, Homo sapiens
ctctttgctatgacatcac

SEQ ID NO: 3466 - DNA, 19 bp, Homo sapiens
gtgatgtcatagcaaagag

SEQ ID NO: 3467 - DNA, 19 bp, Homo sapiens
tctttgctatgacatcacc

SEQ ID NO: 3468 - DNA, 19 bp, Homo sapiens
ggtgatgtcatagcaaaga

SEQ ID NO: 3469 - DNA, 19 bp, Homo sapiens
ctttgctatgacatcaccg

SEQ ID NO: 3470 - DNA, 19 bp, Homo sapiens
cggtgatgtcatagcaaag

SEQ ID NO: 3471 - DNA, 19 bp, Homo sapiens
tttgctatgacatcaccgt

SEQ ID NO: 3472 - DNA, 19 bp, Homo sapiens
acggtgatgtcatagcaaa

SEQ ID NO: 3473 - DNA, 19 bp, Homo sapiens
ttgctatgacatcaccgtc

SEQ ID NO: 3474 - DNA, 19 bp, Homo sapiens
gacggtgatgtcatagcaa

SEQ ID NO: 3475 - DNA, 19 bp, Homo sapiens
tgctatgacatcaccgtca

SEQ ID NO: 3476 - DNA, 19 bp, Homo sapiens
tgacggtgatgtcatagca

SEQ ID NO: 3477 - DNA, 19 bp, Homo sapiens
gctatgacatcaccgtcat

SEQ ID NO: 3478 - DNA, 19 bp, Homo sapiens
atgacggtgatgtcatagc

SEQ ID NO: 3479 - DNA, 19 bp, Homo sapiens
ctatgacatcaccgtcatc

SEQ ID NO: 3480 - DNA, 19 bp, Homo sapiens
gatgacggtgatgtcatag

SEQ ID NO: 3481 - DNA, 19 bp, Homo sapiens
tatgacatcaccgtcatcc

SEQ ID NO: 3482 - DNA, 19 bp, Homo sapiens
ggatgacggtgatgtcata

SEQ ID NO: 3483 - DNA, 19 bp, Homo sapiens
atgacatcaccgtcatccc

SEQ ID NO: 3484 - DNA, 19 bp, Homo sapiens
gggatgacggtgatgtcat

SEQ ID NO: 3485 - DNA, 19 bp, Homo sapiens
tgacatcaccgtcatccct

SEQ ID NO: 3486 - DNA, 19 bp, Homo sapiens
agggatgacggtgatgtca

SEQ ID NO: 3487 - DNA, 19 bp, Homo sapiens
gacatcaccgtcatcccta

SEQ ID NO: 3488 - DNA, 19 bp, Homo sapiens
tagggatgacggtgatgtc

SEQ ID NO: 3489 - DNA, 19 bp, Homo sapiens
acatcaccgtcatccctaa

SEQ ID NO: 3490 - DNA, 19 bp, Homo sapiens
ttagggatgacggtgatgt

SEQ ID NO: 3491 - DNA, 19 bp, Homo sapiens
catcaccgtcatccctaag

SEQ ID NO: 3492 - DNA, 19 bp, Homo sapiens
cttagggatgacggtgatg

SEQ ID NO: 3493 - DNA, 19 bp, Homo sapiens
atcaccgtcatccctaagt

SEQ ID NO: 3494 - DNA, 19 bp, Homo sapiens
acttagggatgacggtgat

SEQ ID NO: 3495 - DNA, 19 bp, Homo sapiens
tcaccgtcatccctaagtt

SEQ ID NO: 3496 - DNA, 19 bp, Homo sapiens
aacttagggatgacggtga

SEQ ID NO: 3497 - DNA, 19 bp, Homo sapiens
caccgtcatccctaagttc

SEQ ID NO: 3498 - DNA, 19 bp, Homo sapiens
gaacttagggatgacggtg

SEQ ID NO: 3499 - DNA, 19 bp, Homo sapiens
accgtcatccctaagttca

SEQ ID NO: 3500 - DNA, 19 bp, Homo sapiens
tgaacttagggatgacggt

SEQ ID NO: 3501 - DNA, 19 bp, Homo sapiens
ccgtcatccctaagttcag

SEQ ID NO: 3502 - DNA, 19 bp, Homo sapiens
ctgaacttagggatgacgg

SEQ ID NO: 3503 - DNA, 19 bp, Homo sapiens
cgtcatccctaagttcaga

SEQ ID NO: 3504 - DNA, 19 bp, Homo sapiens
tctgaacttagggatgacg

SEQ ID NO: 3505 - DNA, 19 bp, Homo sapiens
gtcatccctaagttcagac

SEQ ID NO: 3506 - DNA, 19 bp, Homo sapiens
gtctgaacttagggatgac

SEQ ID NO: 3507 - DNA, 19 bp, Homo sapiens
tcatccctaagttcagacc

SEQ ID NO: 3508 - DNA, 19 bp, Homo sapiens
ggtctgaacttagggatga

SEQ ID NO: 3509 - DNA, 19 bp, Homo sapiens
catccctaagttcagacct

SEQ ID NO: 3510 - DNA, 19 bp, Homo sapiens
aggtctgaacttagggatg

SEQ ID NO: 3511 - DNA, 19 bp, Homo sapiens
atccctaagttcagacctg

SEQ ID NO: 3512 - DNA, 19 bp, Homo sapiens
caggtctgaacttagggat

SEQ ID NO: 3513 - DNA, 19 bp, Homo sapiens
tccctaagttcagacctgg

SEQ ID NO: 3514 - DNA, 19 bp, Homo sapiens
ccaggtctgaacttaggga

SEQ ID NO: 3515 - DNA, 19 bp, Homo sapiens
ccctaagttcagacctgga

SEQ ID NO: 3516 - DNA, 19 bp, Homo sapiens
tccaggtctgaacttaggg

SEQ ID NO: 3517 - DNA, 19 bp, Homo sapiens
cctaagttcagacctggac

SEQ ID NO: 3518 - DNA, 19 bp, Homo sapiens
gtccaggtctgaacttagg

SEQ ID NO: 3519 - DNA, 19 bp, Homo sapiens
ctaagttcagacctggacc

SEQ ID NO: 3520 - DNA, 19 bp, Homo sapiens
ggtccaggtctgaacttag

SEQ ID NO: 3521 - DNA, 19 bp, Homo sapiens
taagttcagacctggacca

SEQ ID NO: 3522 - DNA, 19 bp, Homo sapiens
tggtccaggtctgaactta

SEQ ID NO: 3523 - DNA, 19 bp, Homo sapiens
aagttcagacctggaccac

SEQ ID NO: 3524 - DNA, 19 bp, Homo sapiens
gtggtccaggtctgaactt

SEQ ID NO: 3525 - DNA, 19 bp, Homo sapiens
agttcagacctggaccacg

SEQ ID NO: 3526 - DNA, 19 bp, Homo sapiens
cgtggtccaggtctgaact

SEQ ID NO: 3527 - DNA, 19 bp, Homo sapiens
gttcagacctggaccacgg

SEQ ID NO: 3528 - DNA, 19 bp, Homo sapiens
ccgtggtccaggtctgaac

SEQ ID NO: 3529 - DNA, 19 bp, Homo sapiens
ttcagacctggaccacggt

SEQ ID NO: 3530 - DNA, 19 bp, Homo sapiens
accgtggtccaggtctgaa

SEQ ID NO: 3531 - DNA, 19 bp, Homo sapiens
tcagacctggaccacggtg

SEQ ID NO: 3532 - DNA, 19 bp, Homo sapiens
caccgtggtccaggtctga

SEQ ID NO: 3533 - DNA, 19 bp, Homo sapiens
cagacctggaccacggtgg

SEQ ID NO: 3534 - DNA, 19 bp, Homo sapiens
ccaccgtggtccaggtctg

SEQ ID NO: 3535 - DNA, 19 bp, Homo sapiens
agacctggaccacggtggt

SEQ ID NO: 3536 - DNA, 19 bp, Homo sapiens
accaccgtggtccaggtct

SEQ ID NO: 3537 - DNA, 19 bp, Homo sapiens
gacctggaccacggtggtg

SEQ ID NO: 3538 - DNA, 19 bp, Homo sapiens
caccaccgtggtccaggtc

SEQ ID NO: 3539 - DNA, 19 bp, Homo sapiens
acctggaccacggtggtgt

SEQ ID NO: 3540 - DNA, 19 bp, Homo sapiens
acaccaccgtggtccaggt

SEQ ID NO: 3541 - DNA, 19 bp, Homo sapiens
cctggaccacggtggtgtg

SEQ ID NO: 3542 - DNA, 19 bp, Homo sapiens
cacaccaccgtggtccagg

SEQ ID NO: 3543 - DNA, 19 bp, Homo sapiens
ctggaccacggtggtgtgc

SEQ ID NO: 3544 - DNA, 19 bp, Homo sapiens
gcacaccaccgtggtccag

SEQ ID NO: 3545 - DNA, 19 bp, Homo sapiens
tggaccacggtggtgtgcg

SEQ ID NO: 3546 - DNA, 19 bp, Homo sapiens
cgcacaccaccgtggtcca

SEQ ID NO: 3547 - DNA, 19 bp, Homo sapiens
ggaccacggtggtgtgcgg

SEQ ID NO: 3548 - DNA, 19 bp, Homo sapiens
ccgcacaccaccgtggtcc

SEQ ID NO: 3549 - DNA, 19 bp, Homo sapiens
gaccacggtggtgtgcggt

SEQ ID NO: 3550 - DNA, 19 bp, Homo sapiens
accgcacaccaccgtggtc

SEQ ID NO: 3551 - DNA, 19 bp, Homo sapiens
accacggtggtgtgcggtt

SEQ ID NO: 3552 - DNA, 19 bp, Homo sapiens
aaccgcacaccaccgtggt

SEQ ID NO: 3553 - DNA, 19 bp, Homo sapiens
ccacggtggtgtgcggttc

SEQ ID NO: 3554 - DNA, 19 bp, Homo sapiens
gaaccgcacaccaccgtgg

SEQ ID NO: 3555 - DNA, 19 bp, Homo sapiens
cacggtggtgtgcggttca

SEQ ID NO: 3556 - DNA, 19 bp, Homo sapiens
tgaaccgcacaccaccgtg

SEQ ID NO: 3557 - DNA, 19 bp, Homo sapiens
acggtggtgtgcggttcaa

SEQ ID NO: 3558 - DNA, 19 bp, Homo sapiens
ttgaaccgcacaccaccgt

SEQ ID NO: 3559 - DNA, 19 bp, Homo sapiens
cggtggtgtgcggttcaag

SEQ ID NO: 3560 - DNA, 19 bp, Homo sapiens
cttgaaccgcacaccaccg

SEQ ID NO: 3561 - DNA, 19 bp, Homo sapiens
ggtggtgtgcggttcaagg

SEQ ID NO: 3562 - DNA, 19 bp, Homo sapiens
ccttgaaccgcacaccacc

SEQ ID NO: 3563 - DNA, 19 bp, Homo sapiens
gtggtgtgcggttcaaggc

SEQ ID NO: 3564 - DNA, 19 bp, Homo sapiens
gccttgaaccgcacaccac

SEQ ID NO: 3565 - DNA, 19 bp, Homo sapiens
tggtgtgcggttcaaggcc

SEQ ID NO: 3566 - DNA, 19 bp, Homo sapiens
ggccttgaaccgcacacca

SEQ ID NO: 3567 - DNA, 19 bp, Homo sapiens
ggtgtgcggttcaaggcca

SEQ ID NO: 3568 - DNA, 19 bp, Homo sapiens
tggccttgaaccgcacacc

SEQ ID NO: 3569 - DNA, 19 bp, Homo sapiens
gtgtgcggttcaaggccag

SEQ ID NO: 3570 - DNA, 19 bp, Homo sapiens
ctggccttgaaccgcacac

SEQ ID NO: 3571 - DNA, 19 bp, Homo sapiens
tgtgcggttcaaggccagg

SEQ ID NO: 3572 - DNA, 19 bp, Homo sapiens
cctggccttgaaccgcaca

SEQ ID NO: 3573 - DNA, 19 bp, Homo sapiens
gtgcggttcaaggccaggt

SEQ ID NO: 3574 - DNA, 19 bp, Homo sapiens
acctggccttgaaccgcac

SEQ ID NO: 3575 - DNA, 19 bp, Homo sapiens
tgcggttcaaggccaggtg

SEQ ID NO: 3576 - DNA, 19 bp, Homo sapiens
cacctggccttgaaccgca

SEQ ID NO: 3577 - DNA, 19 bp, Homo sapiens
gcggttcaaggccaggtgg

SEQ ID NO: 3578 - DNA, 19 bp, Homo sapiens
ccacctggccttgaaccgc

SEQ ID NO: 3579 - DNA, 19 bp, Homo sapiens
cggttcaaggccaggtgga

SEQ ID NO: 3580 - DNA, 19 bp, Homo sapiens
tccacctggccttgaaccg

SEQ ID NO: 3581 - DNA, 19 bp, Homo sapiens
ggttcaaggccaggtggat

SEQ ID NO: 3582 - DNA, 19 bp, Homo sapiens
atccacctggccttgaacc

SEQ ID NO: 3583 - DNA, 19 bp, Homo sapiens
gttcaaggccaggtggatg

SEQ ID NO: 3584 - DNA, 19 bp, Homo sapiens
catccacctggccttgaac

SEQ ID NO: 3585 - DNA, 19 bp, Homo sapiens
ttcaaggccaggtggatga

SEQ ID NO: 3586 - DNA, 19 bp, Homo sapiens
tcatccacctggccttgaa

SEQ ID NO: 3587 - DNA, 19 bp, Homo sapiens
tcaaggccaggtggatgaa

SEQ ID NO: 3588 - DNA, 19 bp, Homo sapiens
ttcatccacctggccttga

SEQ ID NO: 3589 - DNA, 19 bp, Homo sapiens
caaggccaggtggatgaaa

SEQ ID NO: 3590 - DNA, 19 bp, Homo sapiens
tttcatccacctggccttg

SEQ ID NO: 3591 - DNA, 19 bp, Homo sapiens
aaggccaggtggatgaaaa

SEQ ID NO: 3592 - DNA, 19 bp, Homo sapiens
ttttcatccacctggcctt

SEQ ID NO: 3593 - DNA, 19 bp, Homo sapiens
aggccaggtggatgaaaag

SEQ ID NO: 3594 - DNA, 19 bp, Homo sapiens
cttttcatccacctggcct

SEQ ID NO: 3595 - DNA, 19 bp, Homo sapiens
ggccaggtggatgaaaaga

SEQ ID NO: 3596 - DNA, 19 bp, Homo sapiens
tcttttcatccacctggcc

SEQ ID NO: 3597 - DNA, 19 bp, Homo sapiens
gccaggtggatgaaaagac

SEQ ID NO: 3598 - DNA, 19 bp, Homo sapiens
gtcttttcatccacctggc

SEQ ID NO: 3599 - DNA, 19 bp, Homo sapiens
ccaggtggatgaaaagact

SEQ ID NO: 3600 - DNA, 19 bp, Homo sapiens
agtcttttcatccacctgg

SEQ ID NO: 3601 - DNA, 19 bp, Homo sapiens
caggtggatgaaaagactt

SEQ ID NO: 3602 - DNA, 19 bp, Homo sapiens
aagtcttttcatccacctg

SEQ ID NO: 3603 - DNA, 19 bp, Homo sapiens
aggtggatgaaaagacttt

SEQ ID NO: 3604 - DNA, 19 bp, Homo sapiens
aaagtcttttcatccacct

SEQ ID NO: 3605 - DNA, 19 bp, Homo sapiens
ggtggatgaaaagactttt

SEQ ID NO: 3606 - DNA, 19 bp, Homo sapiens
aaaagtcttttcatccacc

SEQ ID NO: 3607 - DNA, 19 bp, Homo sapiens
gtggatgaaaagacttttc

SEQ ID NO: 3608 - DNA, 19 bp, Homo sapiens
gaaaagtcttttcatccac

SEQ ID NO: 3609 - DNA, 19 bp, Homo sapiens
tggatgaaaagacttttct

SEQ ID NO: 3610 - DNA, 19 bp, Homo sapiens
agaaaagtcttttcatcca

SEQ ID NO: 3611 - DNA, 19 bp, Homo sapiens
ggatgaaaagacttttctt

SEQ ID NO: 3612 - DNA, 19 bp, Homo sapiens
aagaaaagtcttttcatcc

SEQ ID NO: 3613 - DNA, 19 bp, Homo sapiens
gatgaaaagacttttcttc

SEQ ID NO: 3614 - DNA, 19 bp, Homo sapiens
gaagaaaagtcttttcatc

SEQ ID NO: 3615 - DNA, 19 bp, Homo sapiens
atgaaaagacttttcttca

SEQ ID NO: 3616 - DNA, 19 bp, Homo sapiens
tgaagaaaagtcttttcat

SEQ ID NO: 3617 - DNA, 19 bp, Homo sapiens
tgaaaagacttttcttcac

SEQ ID NO: 3618 - DNA, 19 bp, Homo sapiens
gtgaagaaaagtcttttca

SEQ ID NO: 3619 - DNA, 19 bp, Homo sapiens
gaaaagacttttcttcact

SEQ ID NO: 3620 - DNA, 19 bp, Homo sapiens
agtgaagaaaagtcttttc

SEQ ID NO: 3621 - DNA, 19 bp, Homo sapiens
aaaagacttttcttcacta

SEQ ID NO: 3622 - DNA, 19 bp, Homo sapiens
tagtgaagaaaagtctttt

SEQ ID NO: 3623 - DNA, 19 bp, Homo sapiens
aaagacttttcttcactat

SEQ ID NO: 3624 - DNA, 19 bp, Homo sapiens
atagtgaagaaaagtcttt

SEQ ID NO: 3625 - DNA, 19 bp, Homo sapiens
aagacttttcttcactatg

SEQ ID NO: 3626 - DNA, 19 bp, Homo sapiens
catagtgaagaaaagtctt

SEQ ID NO: 3627 - DNA, 19 bp, Homo sapiens
agacttttcttcactatga

SEQ ID NO: 3628 - DNA, 19 bp, Homo sapiens
tcatagtgaagaaaagtct

SEQ ID NO: 3629 - DNA, 19 bp, Homo sapiens
gacttttcttcactatgac

SEQ ID NO: 3630 - DNA, 19 bp, Homo sapiens
gtcatagtgaagaaaagtc

SEQ ID NO: 3631 - DNA, 19 bp, Homo sapiens
acttttcttcactatgact

SEQ ID NO: 3632 - DNA, 19 bp, Homo sapiens
agtcatagtgaagaaaagt

SEQ ID NO: 3633 - DNA, 19 bp, Homo sapiens
cttttcttcactatgactg

SEQ ID NO: 3634 - DNA, 19 bp, Homo sapiens
cagtcatagtgaagaaaag

SEQ ID NO: 3635 - DNA, 19 bp, Homo sapiens
ttttcttcactatgactgt

SEQ ID NO: 3636 - DNA, 19 bp, Homo sapiens
acagtcatagtgaagaaaa

SEQ ID NO: 3637 - DNA, 19 bp, Homo sapiens
tttcttcactatgactgtg

SEQ ID NO: 3638 - DNA, 19 bp, Homo sapiens
cacagtcatagtgaagaaa

SEQ ID NO: 3639 - DNA, 19 bp, Homo sapiens
ttcttcactatgactgtgg

SEQ ID NO: 3640 - DNA, 19 bp, Homo sapiens
ccacagtcatagtgaagaa

SEQ ID NO: 3641 - DNA, 19 bp, Homo sapiens
tcttcactatgactgtggc

SEQ ID NO: 3642 - DNA, 19 bp, Homo sapiens
gccacagtcatagtgaaga

SEQ ID NO: 3643 - DNA, 19 bp, Homo sapiens
cttcactatgactgtggca

SEQ ID NO: 3644 - DNA, 19 bp, Homo sapiens
tgccacagtcatagtgaag

SEQ ID NO: 3645 - DNA, 19 bp, Homo sapiens
ttcactatgactgtggcaa

SEQ ID NO: 3646 - DNA, 19 bp, Homo sapiens
ttgccacagtcatagtgaa

SEQ ID NO: 3647 - DNA, 19 bp, Homo sapiens
tcactatgactgtggcaac

SEQ ID NO: 3648 - DNA, 19 bp, Homo sapiens
gttgccacagtcatagtga

SEQ ID NO: 3649 - DNA, 19 bp, Homo sapiens
cactatgactgtggcaaca

SEQ ID NO: 3650 - DNA, 19 bp, Homo sapiens
tgttgccacagtcatagtg

SEQ ID NO: 3651 - DNA, 19 bp, Homo sapiens
actatgactgtggcaacaa

SEQ ID NO: 3652 - DNA, 19 bp, Homo sapiens
ttgttgccacagtcatagt

SEQ ID NO: 3653 - DNA, 19 bp, Homo sapiens
ctatgactgtggcaacaag

SEQ ID NO: 3654 - DNA, 19 bp, Homo sapiens
cttgttgccacagtcatag

SEQ ID NO: 3655 - DNA, 19 bp, Homo sapiens
tatgactgtggcaacaaga

SEQ ID NO: 3656 - DNA, 19 bp, Homo sapiens
tcttgttgccacagtcata

SEQ ID NO: 3657 - DNA, 19 bp, Homo sapiens
atgactgtggcaacaagac

SEQ ID NO: 3658 - DNA, 19 bp, Homo sapiens
gtcttgttgccacagtcat

SEQ ID NO: 3659 - DNA, 19 bp, Homo sapiens
tgactgtggcaacaagaca

SEQ ID NO: 3660 - DNA, 19 bp, Homo sapiens
tgtcttgttgccacagtca

SEQ ID NO: 3661 - DNA, 19 bp, Homo sapiens
gactgtggcaacaagacag

SEQ ID NO: 3662 - DNA, 19 bp, Homo sapiens
ctgtcttgttgccacagtc

SEQ ID NO: 3663 - DNA, 19 bp, Homo sapiens
actgtggcaacaagacagt

SEQ ID NO: 3664 - DNA, 19 bp, Homo sapiens
actgtcttgttgccacagt

SEQ ID NO: 3665 - DNA, 19 bp, Homo sapiens
ctgtggcaacaagacagtc

SEQ ID NO: 3666 - DNA, 19 bp, Homo sapiens
gactgtcttgttgccacag

SEQ ID NO: 3667 - DNA, 19 bp, Homo sapiens
tgtggcaacaagacagtca

SEQ ID NO: 3668 - DNA, 19 bp, Homo sapiens
tgactgtcttgttgccaca

SEQ ID NO: 3669 - DNA, 19 bp, Homo sapiens
gtggcaacaagacagtcac

SEQ ID NO: 3670 - DNA, 19 bp, Homo sapiens
gtgactgtcttgttgccac

SEQ ID NO: 3671 - DNA, 19 bp, Homo sapiens
tggcaacaagacagtcaca

SEQ ID NO: 3672 - DNA, 19 bp, Homo sapiens
tgtgactgtcttgttgcca

SEQ ID NO: 3673 - DNA, 19 bp, Homo sapiens
ggcaacaagacagtcacac

SEQ ID NO: 3674 - DNA, 19 bp, Homo sapiens
gtgtgactgtcttgttgcc

SEQ ID NO: 3675 - DNA, 19 bp, Homo sapiens
gcaacaagacagtcacacc

SEQ ID NO: 3676 - DNA, 19 bp, Homo sapiens
ggtgtgactgtcttgttgc

SEQ ID NO: 3677 - DNA, 19 bp, Homo sapiens
caacaagacagtcacaccc

SEQ ID NO: 3678 - DNA, 19 bp, Homo sapiens
gggtgtgactgtcttgttg

SEQ ID NO: 3679 - DNA, 19 bp, Homo sapiens
aacaagacagtcacacccg

SEQ ID NO: 3680 - DNA, 19 bp, Homo sapiens
cgggtgtgactgtcttgtt

SEQ ID NO: 3681 - DNA, 19 bp, Homo sapiens
acaagacagtcacacccgt

SEQ ID NO: 3682 - DNA, 19 bp, Homo sapiens
acgggtgtgactgtcttgt

SEQ ID NO: 3683 - DNA, 19 bp, Homo sapiens
caagacagtcacacccgtc

SEQ ID NO: 3684 - DNA, 19 bp, Homo sapiens
gacgggtgtgactgtcttg

SEQ ID NO: 3685 - DNA, 19 bp, Homo sapiens
aagacagtcacacccgtca

SEQ ID NO: 3686 - DNA, 19 bp, Homo sapiens
tgacgggtgtgactgtctt

SEQ ID NO: 3687 - DNA, 19 bp, Homo sapiens
agacagtcacacccgtcag

SEQ ID NO: 3688 - DNA, 19 bp, Homo sapiens
ctgacgggtgtgactgtct

SEQ ID NO: 3689 - DNA, 19 bp, Homo sapiens
gacagtcacacccgtcagt

SEQ ID NO: 3690 - DNA, 19 bp, Homo sapiens
actgacgggtgtgactgtc

SEQ ID NO: 3691 - DNA, 19 bp, Homo sapiens
acagtcacacccgtcagtc

SEQ ID NO: 3692 - DNA, 19 bp, Homo sapiens
gactgacgggtgtgactgt

SEQ ID NO: 3693 - DNA, 19 bp, Homo sapiens
cagtcacacccgtcagtcc

SEQ ID NO: 3694 - DNA, 19 bp, Homo sapiens
ggactgacgggtgtgactg

SEQ ID NO: 3695 - DNA, 19 bp, Homo sapiens
agtcacacccgtcagtccc

SEQ ID NO: 3696 - DNA, 19 bp, Homo sapiens
gggactgacgggtgtgact

SEQ ID NO: 3697 - DNA, 19 bp, Homo sapiens
gtcacacccgtcagtcccc

SEQ ID NO: 3698 - DNA, 19 bp, Homo sapiens
ggggactgacgggtgtgac

SEQ ID NO: 3699 - DNA, 19 bp, Homo sapiens
tcacacccgtcagtcccct

SEQ ID NO: 3700 - DNA, 19 bp, Homo sapiens
aggggactgacgggtgtga

SEQ ID NO: 3701 - DNA, 19 bp, Homo sapiens
cacacccgtcagtcccctg

SEQ ID NO: 3702 - DNA, 19 bp, Homo sapiens
caggggactgacgggtgtg

SEQ ID NO: 3703 - DNA, 19 bp, Homo sapiens
acacccgtcagtcccctgg

SEQ ID NO: 3704 - DNA, 19 bp, Homo sapiens
ccaggggactgacgggtgt

SEQ ID NO: 3705 - DNA, 19 bp, Homo sapiens
cacccgtcagtcccctggg

SEQ ID NO: 3706 - DNA, 19 bp, Homo sapiens
cccaggggactgacgggtg

SEQ ID NO: 3707 - DNA, 19 bp, Homo sapiens
acccgtcagtcccctgggg

SEQ ID NO: 3708 - DNA, 19 bp, Homo sapiens
ccccaggggactgacgggt

SEQ ID NO: 3709 - DNA, 19 bp, Homo sapiens
cccgtcagtcccctgggga

SEQ ID NO: 3710 - DNA, 19 bp, Homo sapiens
tccccaggggactgacggg

SEQ ID NO: 3711 - DNA, 19 bp, Homo sapiens
ccgtcagtcccctggggaa

SEQ ID NO: 3712 - DNA, 19 bp, Homo sapiens
ttccccaggggactgacgg

SEQ ID NO: 3713 - DNA, 19 bp, Homo sapiens
cgtcagtcccctggggaag

SEQ ID NO: 3714 - DNA, 19 bp, Homo sapiens
cttccccaggggactgacg

SEQ ID NO: 3715 - DNA, 19 bp, Homo sapiens
gtcagtcccctggggaaga

SEQ ID NO: 3716 - DNA, 19 bp, Homo sapiens
tcttccccaggggactgac

SEQ ID NO: 3717 - DNA, 19 bp, Homo sapiens
tcagtcccctggggaagaa

SEQ ID NO: 3718 - DNA, 19 bp, Homo sapiens
ttcttccccaggggactga

SEQ ID NO: 3719 - DNA, 19 bp, Homo sapiens
cagtcccctggggaagaaa

SEQ ID NO: 3720 - DNA, 19 bp, Homo sapiens
tttcttccccaggggactg

SEQ ID NO: 3721 - DNA, 19 bp, Homo sapiens
agtcccctggggaagaaac

SEQ ID NO: 3722 - DNA, 19 bp, Homo sapiens
gtttcttccccaggggact

SEQ ID NO: 3723 - DNA, 19 bp, Homo sapiens
gtcccctggggaagaaact

SEQ ID NO: 3724 - DNA, 19 bp, Homo sapiens
agtttcttccccaggggac

SEQ ID NO: 3725 - DNA, 19 bp, Homo sapiens
tcccctggggaagaaacta

SEQ ID NO: 3726 - DNA, 19 bp, Homo sapiens
tagtttcttccccagggga

SEQ ID NO: 3727 - DNA, 19 bp, Homo sapiens
cccctggggaagaaactaa

SEQ ID NO: 3728 - DNA, 19 bp, Homo sapiens
ttagtttcttccccagggg

SEQ ID NO: 3729 - DNA, 19 bp, Homo sapiens
ccctggggaagaaactaaa

SEQ ID NO: 3730 - DNA, 19 bp, Homo sapiens
tttagtttcttccccaggg

SEQ ID NO: 3731 - DNA, 19 bp, Homo sapiens
cctggggaagaaactaaat

SEQ ID NO: 3732 - DNA, 19 bp, Homo sapiens
atttagtttcttccccagg

SEQ ID NO: 3733 - DNA, 19 bp, Homo sapiens
ctggggaagaaactaaatg

SEQ ID NO: 3734 - DNA, 19 bp, Homo sapiens
catttagtttcttccccag

SEQ ID NO: 3735 - DNA, 19 bp, Homo sapiens
tggggaagaaactaaatgt

SEQ ID NO: 3736 - DNA, 19 bp, Homo sapiens
acatttagtttcttcccca

SEQ ID NO: 3737 - DNA, 19 bp, Homo sapiens
ggggaagaaactaaatgtc

SEQ ID NO: 3738 - DNA, 19 bp, Homo sapiens
gacatttagtttcttcccc

SEQ ID NO: 3739 - DNA, 19 bp, Homo sapiens
gggaagaaactaaatgtca

SEQ ID NO: 3740 - DNA, 19 bp, Homo sapiens
tgacatttagtttcttccc

SEQ ID NO: 3741 - DNA, 19 bp, Homo sapiens
ggaagaaactaaatgtcac

SEQ ID NO: 3742 - DNA, 19 bp, Homo sapiens
gtgacatttagtttcttcc

SEQ ID NO: 3743 - DNA, 19 bp, Homo sapiens
gaagaaactaaatgtcaca

SEQ ID NO: 3744 - DNA, 19 bp, Homo sapiens
tgtgacatttagtttcttc

SEQ ID NO: 3745 - DNA, 19 bp, Homo sapiens
aagaaactaaatgtcacaa

SEQ ID NO: 3746 - DNA, 19 bp, Homo sapiens
ttgtgacatttagtttctt

SEQ ID NO: 3747 - DNA, 19 bp, Homo sapiens
agaaactaaatgtcacaat

SEQ ID NO: 3748 - DNA, 19 bp, Homo sapiens
attgtgacatttagtttct

SEQ ID NO: 3749 - DNA, 19 bp, Homo sapiens
gaaactaaatgtcacaatg

SEQ ID NO: 3750 - DNA, 19 bp, Homo sapiens
cattgtgacatttagtttc

SEQ ID NO: 3751 - DNA, 19 bp, Homo sapiens
aaactaaatgtcacaatgg

SEQ ID NO: 3752 - DNA, 19 bp, Homo sapiens
ccattgtgacatttagttt

SEQ ID NO: 3753 - DNA, 19 bp, Homo sapiens
aactaaatgtcacaatggc

SEQ ID NO: 3754 - DNA, 19 bp, Homo sapiens
gccattgtgacatttagtt

SEQ ID NO: 3755 - DNA, 19 bp, Homo sapiens
actaaatgtcacaatggcc

SEQ ID NO: 3756 - DNA, 19 bp, Homo sapiens
ggccattgtgacatttagt

SEQ ID NO: 3757 - DNA, 19 bp, Homo sapiens
ctaaatgtcacaatggcct

SEQ ID NO: 3758 - DNA, 19 bp, Homo sapiens
aggccattgtgacatttag

SEQ ID NO: 3759 - DNA, 19 bp, Homo sapiens
taaatgtcacaatggcctg

SEQ ID NO: 3760 - DNA, 19 bp, Homo sapiens
caggccattgtgacattta

SEQ ID NO: 3761 - DNA, 19 bp, Homo sapiens
aaatgtcacaatggcctgg

SEQ ID NO: 3762 - DNA, 19 bp, Homo sapiens
ccaggccattgtgacattt

SEQ ID NO: 3763 - DNA, 19 bp, Homo sapiens
aatgtcacaatggcctgga

SEQ ID NO: 3764 - DNA, 19 bp, Homo sapiens
tccaggccattgtgacatt

SEQ ID NO: 3765 - DNA, 19 bp, Homo sapiens
atgtcacaatggcctggaa

SEQ ID NO: 3766 - DNA, 19 bp, Homo sapiens
ttccaggccattgtgacat

SEQ ID NO: 3767 - DNA, 19 bp, Homo sapiens
tgtcacaatggcctggaaa

SEQ ID NO: 3768 - DNA, 19 bp, Homo sapiens
tttccaggccattgtgaca

SEQ ID NO: 3769 - DNA, 19 bp, Homo sapiens
gtcacaatggcctggaaag

SEQ ID NO: 3770 - DNA, 19 bp, Homo sapiens
ctttccaggccattgtgac

SEQ ID NO: 3771 - DNA, 19 bp, Homo sapiens
tcacaatggcctggaaagc

SEQ ID NO: 3772 - DNA, 19 bp, Homo sapiens
gctttccaggccattgtga

SEQ ID NO: 3773 - DNA, 19 bp, Homo sapiens
cacaatggcctggaaagca

SEQ ID NO: 3774 - DNA, 19 bp, Homo sapiens
tgctttccaggccattgtg

SEQ ID NO: 3775 - DNA, 19 bp, Homo sapiens
acaatggcctggaaagcac

SEQ ID NO: 3776 - DNA, 19 bp, Homo sapiens
gtgctttccaggccattgt

SEQ ID NO: 3777 - DNA, 19 bp, Homo sapiens
caatggcctggaaagcaca

SEQ ID NO: 3778 - DNA, 19 bp, Homo sapiens
tgtgctttccaggccattg

SEQ ID NO: 3779 - DNA, 19 bp, Homo sapiens
aatggcctggaaagcacag

SEQ ID NO: 3780 - DNA, 19 bp, Homo sapiens
ctgtgctttccaggccatt

SEQ ID NO: 3781 - DNA, 19 bp, Homo sapiens
atggcctggaaagcacaga

SEQ ID NO: 3782 - DNA, 19 bp, Homo sapiens
tctgtgctttccaggccat

SEQ ID NO: 3783 - DNA, 19 bp, Homo sapiens
tggcctggaaagcacagaa

SEQ ID NO: 3784 - DNA, 19 bp, Homo sapiens
ttctgtgctttccaggcca

SEQ ID NO: 3785 - DNA, 19 bp, Homo sapiens
ggcctggaaagcacagaac

SEQ ID NO: 3786 - DNA, 19 bp, Homo sapiens
gttctgtgctttccaggcc

SEQ ID NO: 3787 - DNA, 19 bp, Homo sapiens
gcctggaaagcacagaacc

SEQ ID NO: 3788 - DNA, 19 bp, Homo sapiens
ggttctgtgctttccaggc

SEQ ID NO: 3789 - DNA, 19 bp, Homo sapiens
cctggaaagcacagaaccc

SEQ ID NO: 3790 - DNA, 19 bp, Homo sapiens
gggttctgtgctttccagg

SEQ ID NO: 3791 - DNA, 19 bp, Homo sapiens
ctggaaagcacagaaccca

SEQ ID NO: 3792 - DNA, 19 bp, Homo sapiens
tgggttctgtgctttccag

SEQ ID NO: 3793 - DNA, 19 bp, Homo sapiens
tggaaagcacagaacccag

SEQ ID NO: 3794 - DNA, 19 bp, Homo sapiens
ctgggttctgtgctttcca

SEQ ID NO: 3795 - DNA, 19 bp, Homo sapiens
ggaaagcacagaacccagt

SEQ ID NO: 3796 - DNA, 19 bp, Homo sapiens
actgggttctgtgctttcc

SEQ ID NO: 3797 - DNA, 19 bp, Homo sapiens
gaaagcacagaacccagta

SEQ ID NO: 3798 - DNA, 19 bp, Homo sapiens
tactgggttctgtgctttc

SEQ ID NO: 3799 - DNA, 19 bp, Homo sapiens
aaagcacagaacccagtac

SEQ ID NO: 3800 - DNA, 19 bp, Homo sapiens
gtactgggttctgtgcttt

SEQ ID NO: 3801 - DNA, 19 bp, Homo sapiens
aagcacagaacccagtact

SEQ ID NO: 3802 - DNA, 19 bp, Homo sapiens
agtactgggttctgtgctt

SEQ ID NO: 3803 - DNA, 19 bp, Homo sapiens
agcacagaacccagtactg

SEQ ID NO: 3804 - DNA, 19 bp, Homo sapiens
cagtactgggttctgtgct

SEQ ID NO: 3805 - DNA, 19 bp, Homo sapiens
gcacagaacccagtactga

SEQ ID NO: 3806 - DNA, 19 bp, Homo sapiens
tcagtactgggttctgtgc

SEQ ID NO: 3807 - DNA, 19 bp, Homo sapiens
cacagaacccagtactgag

SEQ ID NO: 3808 - DNA, 19 bp, Homo sapiens
ctcagtactgggttctgtg

SEQ ID NO: 3809 - DNA, 19 bp, Homo sapiens
acagaacccagtactgaga

SEQ ID NO: 3810 - DNA, 19 bp, Homo sapiens
tctcagtactgggttctgt

SEQ ID NO: 3811 - DNA, 19 bp, Homo sapiens
cagaacccagtactgagag

SEQ ID NO: 3812 - DNA, 19 bp, Homo sapiens
ctctcagtactgggttctg

SEQ ID NO: 3813 - DNA, 19 bp, Homo sapiens
agaacccagtactgagaga

SEQ ID NO: 3814 - DNA, 19 bp, Homo sapiens
tctctcagtactgggttct

SEQ ID NO: 3815 - DNA, 19 bp, Homo sapiens
gaacccagtactgagagag

SEQ ID NO: 3816 - DNA, 19 bp, Homo sapiens
ctctctcagtactgggttc

SEQ ID NO: 3817 - DNA, 19 bp, Homo sapiens
aacccagtactgagagagg

SEQ ID NO: 3818 - DNA, 19 bp, Homo sapiens
cctctctcagtactgggtt

SEQ ID NO: 3819 - DNA, 19 bp, Homo sapiens
acccagtactgagagaggt

SEQ ID NO: 3820 - DNA, 19 bp, Homo sapiens
acctctctcagtactgggt

SEQ ID NO: 3821 - DNA, 19 bp, Homo sapiens
cccagtactgagagaggtg

SEQ ID NO: 3822 - DNA, 19 bp, Homo sapiens
cacctctctcagtactggg

SEQ ID NO: 3823 - DNA, 19 bp, Homo sapiens
ccagtactgagagaggtgg

SEQ ID NO: 3824 - DNA, 19 bp, Homo sapiens
ccacctctctcagtactgg

SEQ ID NO: 3825 - DNA, 19 bp, Homo sapiens
cagtactgagagaggtggt

SEQ ID NO: 3826 - DNA, 19 bp, Homo sapiens
accacctctctcagtactg

SEQ ID NO: 3827 - DNA, 19 bp, Homo sapiens
agtactgagagaggtggtg

SEQ ID NO: 3828 - DNA, 19 bp, Homo sapiens
caccacctctctcagtact

SEQ ID NO: 3829 - DNA, 19 bp, Homo sapiens
gtactgagagaggtggtgg

SEQ ID NO: 3830 - DNA, 19 bp, Homo sapiens
ccaccacctctctcagtac

SEQ ID NO: 3831 - DNA, 19 bp, Homo sapiens
tactgagagaggtggtgga

SEQ ID NO: 3832 - DNA, 19 bp, Homo sapiens
tccaccacctctctcagta

SEQ ID NO: 3833 - DNA, 19 bp, Homo sapiens
actgagagaggtggtggac

SEQ ID NO: 3834 - DNA, 19 bp, Homo sapiens
gtccaccacctctctcagt

SEQ ID NO: 3835 - DNA, 19 bp, Homo sapiens
ctgagagaggtggtggaca

SEQ ID NO: 3836 - DNA, 19 bp, Homo sapiens
tgtccaccacctctctcag

SEQ ID NO: 3837 - DNA, 19 bp, Homo sapiens
tgagagaggtggtggacat

SEQ ID NO: 3838 - DNA, 19 bp, Homo sapiens
atgtccaccacctctctca

SEQ ID NO: 3839 - DNA, 19 bp, Homo sapiens
gagagaggtggtggacata

SEQ ID NO: 3840 - DNA, 19 bp, Homo sapiens
tatgtccaccacctctctc

SEQ ID NO: 3841 - DNA, 19 bp, Homo sapiens
agagaggtggtggacatac

SEQ ID NO: 3842 - DNA, 19 bp, Homo sapiens
gtatgtccaccacctctct

SEQ ID NO: 3843 - DNA, 19 bp, Homo sapiens
gagaggtggtggacatact

SEQ ID NO: 3844 - DNA, 19 bp, Homo sapiens
agtatgtccaccacctctc

SEQ ID NO: 3845 - DNA, 19 bp, Homo sapiens
agaggtggtggacatactt

SEQ ID NO: 3846 - DNA, 19 bp, Homo sapiens
aagtatgtccaccacctct

SEQ ID NO: 3847 - DNA, 19 bp, Homo sapiens
gaggtggtggacatactta

SEQ ID NO: 3848 - DNA, 19 bp, Homo sapiens
taagtatgtccaccacctc

SEQ ID NO: 3849 - DNA, 19 bp, Homo sapiens
aggtggtggacatacttac

SEQ ID NO: 3850 - DNA, 19 bp, Homo sapiens
gtaagtatgtccaccacct

SEQ ID NO: 3851 - DNA, 19 bp, Homo sapiens
ggtggtggacatacttaca

SEQ ID NO: 3852 - DNA, 19 bp, Homo sapiens
tgtaagtatgtccaccacc

SEQ ID NO: 3853 - DNA, 19 bp, Homo sapiens
gtggtggacatacttacag

SEQ ID NO: 3854 - DNA, 19 bp, Homo sapiens
ctgtaagtatgtccaccac

SEQ ID NO: 3855 - DNA, 19 bp, Homo sapiens
tggtggacatacttacaga

SEQ ID NO: 3856 - DNA, 19 bp, Homo sapiens
tctgtaagtatgtccacca

SEQ ID NO: 3857 - DNA, 19 bp, Homo sapiens
ggtggacatacttacagag

SEQ ID NO: 3858 - DNA, 19 bp, Homo sapiens
ctctgtaagtatgtccacc

SEQ ID NO: 3859 - DNA, 19 bp, Homo sapiens
gtggacatacttacagagc

SEQ ID NO: 3860 - DNA, 19 bp, Homo sapiens
gctctgtaagtatgtccac

SEQ ID NO: 3861 - DNA, 19 bp, Homo sapiens
tggacatacttacagagca

SEQ ID NO: 3862 - DNA, 19 bp, Homo sapiens
tgctctgtaagtatgtcca

SEQ ID NO: 3863 - DNA, 19 bp, Homo sapiens
ggacatacttacagagcaa

SEQ ID NO: 3864 - DNA, 19 bp, Homo sapiens
ttgctctgtaagtatgtcc

SEQ ID NO: 3865 - DNA, 19 bp, Homo sapiens
gacatacttacagagcaac

SEQ ID NO: 3866 - DNA, 19 bp, Homo sapiens
gttgctctgtaagtatgtc

SEQ ID NO: 3867 - DNA, 19 bp, Homo sapiens
acatacttacagagcaact

SEQ ID NO: 3868 - DNA, 19 bp, Homo sapiens
agttgctctgtaagtatgt

SEQ ID NO: 3869 - DNA, 19 bp, Homo sapiens
catacttacagagcaactg

SEQ ID NO: 3870 - DNA, 19 bp, Homo sapiens
cagttgctctgtaagtatg

SEQ ID NO: 3871 - DNA, 19 bp, Homo sapiens
atacttacagagcaactgc

SEQ ID NO: 3872 - DNA, 19 bp, Homo sapiens
gcagttgctctgtaagtat

SEQ ID NO: 3873 - DNA, 19 bp, Homo sapiens
tacttacagagcaactgct

SEQ ID NO: 3874 - DNA, 19 bp, Homo sapiens
agcagttgctctgtaagta

SEQ ID NO: 3875 - DNA, 19 bp, Homo sapiens
acttacagagcaactgctt

SEQ ID NO: 3876 - DNA, 19 bp, Homo sapiens
aagcagttgctctgtaagt

SEQ ID NO: 3877 - DNA, 19 bp, Homo sapiens
cttacagagcaactgcttg

SEQ ID NO: 3878 - DNA, 19 bp, Homo sapiens
caagcagttgctctgtaag

SEQ ID NO: 3879 - DNA, 19 bp, Homo sapiens
ttacagagcaactgcttga

SEQ ID NO: 3880 - DNA, 19 bp, Homo sapiens
tcaagcagttgctctgtaa

SEQ ID NO: 3881 - DNA, 19 bp, Homo sapiens
tacagagcaactgcttgac

SEQ ID NO: 3882 - DNA, 19 bp, Homo sapiens
gtcaagcagttgctctgta

SEQ ID NO: 3883 - DNA, 19 bp, Homo sapiens
acagagcaactgcttgaca

SEQ ID NO: 3884 - DNA, 19 bp, Homo sapiens
tgtcaagcagttgctctgt

SEQ ID NO: 3885 - DNA, 19 bp, Homo sapiens
cagagcaactgcttgacat

SEQ ID NO: 3886 - DNA, 19 bp, Homo sapiens
atgtcaagcagttgctctg

SEQ ID NO: 3887 - DNA, 19 bp, Homo sapiens
agagcaactgcttgacatt

SEQ ID NO: 3888 - DNA, 19 bp, Homo sapiens
aatgtcaagcagttgctct

SEQ ID NO: 3889 - DNA, 19 bp, Homo sapiens
gagcaactgcttgacattc

SEQ ID NO: 3890 - DNA, 19 bp, Homo sapiens
gaatgtcaagcagttgctc

SEQ ID NO: 3891 - DNA, 19 bp, Homo sapiens
agcaactgcttgacattca

SEQ ID NO: 3892 - DNA, 19 bp, Homo sapiens
tgaatgtcaagcagttgct

SEQ ID NO: 3893 - DNA, 19 bp, Homo sapiens
gcaactgcttgacattcag

SEQ ID NO: 3894 - DNA, 19 bp, Homo sapiens
ctgaatgtcaagcagttgc

SEQ ID NO: 3895 - DNA, 19 bp, Homo sapiens
caactgcttgacattcagc

SEQ ID NO: 3896 - DNA, 19 bp, Homo sapiens
gctgaatgtcaagcagttg

SEQ ID NO: 3897 - DNA, 19 bp, Homo sapiens
aactgcttgacattcagct

SEQ ID NO: 3898 - DNA, 19 bp, Homo sapiens
agctgaatgtcaagcagtt

SEQ ID NO: 3899 - DNA, 19 bp, Homo sapiens
actgcttgacattcagctg

SEQ ID NO: 3900 - DNA, 19 bp, Homo sapiens
cagctgaatgtcaagcagt

SEQ ID NO: 3901 - DNA, 19 bp, Homo sapiens
ctgcttgacattcagctgg

SEQ ID NO: 3902 - DNA, 19 bp, Homo sapiens
ccagctgaatgtcaagcag

SEQ ID NO: 3903 - DNA, 19 bp, Homo sapiens
tgcttgacattcagctgga

SEQ ID NO: 3904 - DNA, 19 bp, Homo sapiens
tccagctgaatgtcaagca

SEQ ID NO: 3905 - DNA, 19 bp, Homo sapiens
gcttgacattcagctggag

SEQ ID NO: 3906 - DNA, 19 bp, Homo sapiens
ctccagctgaatgtcaagc

SEQ ID NO: 3907 - DNA, 19 bp, Homo sapiens
cttgacattcagctggaga

SEQ ID NO: 3908 - DNA, 19 bp, Homo sapiens
tctccagctgaatgtcaag

SEQ ID NO: 3909 - DNA, 19 bp, Homo sapiens
ttgacattcagctggagaa

SEQ ID NO: 3910 - DNA, 19 bp, Homo sapiens
ttctccagctgaatgtcaa

SEQ ID NO: 3911 - DNA, 19 bp, Homo sapiens
tgacattcagctggagaat

SEQ ID NO: 3912 - DNA, 19 bp, Homo sapiens
attctccagctgaatgtca

SEQ ID NO: 3913 - DNA, 19 bp, Homo sapiens
gacattcagctggagaatt

SEQ ID NO: 3914 - DNA, 19 bp, Homo sapiens
aattctccagctgaatgtc

SEQ ID NO: 3915 - DNA, 19 bp, Homo sapiens
acattcagctggagaatta

SEQ ID NO: 3916 - DNA, 19 bp, Homo sapiens
taattctccagctgaatgt

SEQ ID NO: 3917 - DNA, 19 bp, Homo sapiens
cattcagctggagaattac

SEQ ID NO: 3918 - DNA, 19 bp, Homo sapiens
gtaattctccagctgaatg

SEQ ID NO: 3919 - DNA, 19 bp, Homo sapiens
attcagctggagaattaca

SEQ ID NO: 3920 - DNA, 19 bp, Homo sapiens
tgtaattctccagctgaat

SEQ ID NO: 3921 - DNA, 19 bp, Homo sapiens
ttcagctggagaattacac

SEQ ID NO: 3922 - DNA, 19 bp, Homo sapiens
gtgtaattctccagctgaa

SEQ ID NO: 3923 - DNA, 19 bp, Homo sapiens
tcagctggagaattacaca

SEQ ID NO: 3924 - DNA, 19 bp, Homo sapiens
tgtgtaattctccagctga

SEQ ID NO: 3925 - DNA, 19 bp, Homo sapiens
cagctggagaattacacac

SEQ ID NO: 3926 - DNA, 19 bp, Homo sapiens
gtgtgtaattctccagctg

SEQ ID NO: 3927 - DNA, 19 bp, Homo sapiens
agctggagaattacacacc

SEQ ID NO: 3928 - DNA, 19 bp, Homo sapiens
ggtgtgtaattctccagct

SEQ ID NO: 3929 - DNA, 19 bp, Homo sapiens
gctggagaattacacaccc

SEQ ID NO: 3930 - DNA, 19 bp, Homo sapiens
gggtgtgtaattctccagc

SEQ ID NO: 3931 - DNA, 19 bp, Homo sapiens
ctggagaattacacaccca

SEQ ID NO: 3932 - DNA, 19 bp, Homo sapiens
tgggtgtgtaattctccag

SEQ ID NO: 3933 - DNA, 19 bp, Homo sapiens
tggagaattacacacccaa

SEQ ID NO: 3934 - DNA, 19 bp, Homo sapiens
ttgggtgtgtaattctcca

SEQ ID NO: 3935 - DNA, 19 bp, Homo sapiens
ggagaattacacacccaag

SEQ ID NO: 3936 - DNA, 19 bp, Homo sapiens
cttgggtgtgtaattctcc

SEQ ID NO: 3937 - DNA, 19 bp, Homo sapiens
gagaattacacacccaagg

SEQ ID NO: 3938 - DNA, 19 bp, Homo sapiens
ccttgggtgtgtaattctc

SEQ ID NO: 3939 - DNA, 19 bp, Homo sapiens
agaattacacacccaagga

SEQ ID NO: 3940 - DNA, 19 bp, Homo sapiens
tccttgggtgtgtaattct

SEQ ID NO: 3941 - DNA, 19 bp, Homo sapiens
gaattacacacccaaggaa

SEQ ID NO: 3942 - DNA, 19 bp, Homo sapiens
ttccttgggtgtgtaattc

SEQ ID NO: 3943 - DNA, 19 bp, Homo sapiens
aattacacacccaaggaac

SEQ ID NO: 3944 - DNA, 19 bp, Homo sapiens
gttccttgggtgtgtaatt

SEQ ID NO: 3945 - DNA, 19 bp, Homo sapiens
attacacacccaaggaacc

SEQ ID NO: 3946 - DNA, 19 bp, Homo sapiens
ggttccttgggtgtgtaat

SEQ ID NO: 3947 - DNA, 19 bp, Homo sapiens
ttacacacccaaggaaccc

SEQ ID NO: 3948 - DNA, 19 bp, Homo sapiens
gggttccttgggtgtgtaa

SEQ ID NO: 3949 - DNA, 19 bp, Homo sapiens
tacacacccaaggaacccc

SEQ ID NO: 3950 - DNA, 19 bp, Homo sapiens
ggggttccttgggtgtgta

SEQ ID NO: 3951 - DNA, 19 bp, Homo sapiens
acacacccaaggaacccct

SEQ ID NO: 3952 - DNA, 19 bp, Homo sapiens
aggggttccttgggtgtgt

SEQ ID NO: 3953 - DNA, 19 bp, Homo sapiens
cacacccaaggaacccctc

SEQ ID NO: 3954 - DNA, 19 bp, Homo sapiens
gaggggttccttgggtgtg

SEQ ID NO: 3955 - DNA, 19 bp, Homo sapiens
acacccaaggaacccctca

SEQ ID NO: 3956 - DNA, 19 bp, Homo sapiens
tgaggggttccttgggtgt

SEQ ID NO: 3957 - DNA, 19 bp, Homo sapiens
cacccaaggaacccctcac

SEQ ID NO: 3958 - DNA, 19 bp, Homo sapiens
gtgaggggttccttgggtg

SEQ ID NO: 3959 - DNA, 19 bp, Homo sapiens
acccaaggaacccctcacc

SEQ ID NO: 3960 - DNA, 19 bp, Homo sapiens
ggtgaggggttccttgggt

SEQ ID NO: 3961 - DNA, 19 bp, Homo sapiens
cccaaggaacccctcaccc

SEQ ID NO: 3962 - DNA, 19 bp, Homo sapiens
gggtgaggggttccttggg

SEQ ID NO: 3963 - DNA, 19 bp, Homo sapiens
ccaaggaacccctcaccct

SEQ ID NO: 3964 - DNA, 19 bp, Homo sapiens
agggtgaggggttccttgg

SEQ ID NO: 3965 - DNA, 19 bp, Homo sapiens
caaggaacccctcaccctg

SEQ ID NO: 3966 - DNA, 19 bp, Homo sapiens
cagggtgaggggttccttg

SEQ ID NO: 3967 - DNA, 19 bp, Homo sapiens
aaggaacccctcaccctgc

SEQ ID NO: 3968 - DNA, 19 bp, Homo sapiens
gcagggtgaggggttcctt

SEQ ID NO: 3969 - DNA, 19 bp, Homo sapiens
aggaacccctcaccctgca

SEQ ID NO: 3970 - DNA, 19 bp, Homo sapiens
tgcagggtgaggggttcct

SEQ ID NO: 3971 - DNA, 19 bp, Homo sapiens
ggaacccctcaccctgcag

SEQ ID NO: 3972 - DNA, 19 bp, Homo sapiens
ctgcagggtgaggggttcc

SEQ ID NO: 3973 - DNA, 19 bp, Homo sapiens
gaacccctcaccctgcagg

SEQ ID NO: 3974 - DNA, 19 bp, Homo sapiens
cctgcagggtgaggggttc

SEQ ID NO: 3975 - DNA, 19 bp, Homo sapiens
aacccctcaccctgcaggc

SEQ ID NO: 3976 - DNA, 19 bp, Homo sapiens
gcctgcagggtgaggggtt

SEQ ID NO: 3977 - DNA, 19 bp, Homo sapiens
acccctcaccctgcaggca

SEQ ID NO: 3978 - DNA, 19 bp, Homo sapiens
tgcctgcagggtgaggggt

SEQ ID NO: 3979 - DNA, 19 bp, Homo sapiens
cccctcaccctgcaggcaa

SEQ ID NO: 3980 - DNA, 19 bp, Homo sapiens
ttgcctgcagggtgagggg

SEQ ID NO: 3981 - DNA, 19 bp, Homo sapiens
ccctcaccctgcaggcaag

SEQ ID NO: 3982 - DNA, 19 bp, Homo sapiens
cttgcctgcagggtgaggg

SEQ ID NO: 3983 - DNA, 19 bp, Homo sapiens
cctcaccctgcaggcaagg

SEQ ID NO: 3984 - DNA, 19 bp, Homo sapiens
ccttgcctgcagggtgagg

SEQ ID NO: 3985 - DNA, 19 bp, Homo sapiens
ctcaccctgcaggcaagga

SEQ ID NO: 3986 - DNA, 19 bp, Homo sapiens
tccttgcctgcagggtgag

SEQ ID NO: 3987 - DNA, 19 bp, Homo sapiens
tcaccctgcaggcaaggat

SEQ ID NO: 3988 - DNA, 19 bp, Homo sapiens
atccttgcctgcagggtga

SEQ ID NO: 3989 - DNA, 19 bp, Homo sapiens
caccctgcaggcaaggatg

SEQ ID NO: 3990 - DNA, 19 bp, Homo sapiens
catccttgcctgcagggtg

SEQ ID NO: 3991 - DNA, 19 bp, Homo sapiens
accctgcaggcaaggatgt

SEQ ID NO: 3992 - DNA, 19 bp, Homo sapiens
acatccttgcctgcagggt

SEQ ID NO: 3993 - DNA, 19 bp, Homo sapiens
ccctgcaggcaaggatgtc

SEQ ID NO: 3994 - DNA, 19 bp, Homo sapiens
gacatccttgcctgcaggg

SEQ ID NO: 3995 - DNA, 19 bp, Homo sapiens
cctgcaggcaaggatgtct

SEQ ID NO: 3996 - DNA, 19 bp, Homo sapiens
agacatccttgcctgcagg

SEQ ID NO: 3997 - DNA, 19 bp, Homo sapiens
ctgcaggcaaggatgtctt

SEQ ID NO: 3998 - DNA, 19 bp, Homo sapiens
aagacatccttgcctgcag

SEQ ID NO: 3999 - DNA, 19 bp, Homo sapiens
tgcaggcaaggatgtcttg

SEQ ID NO: 4000 - DNA, 19 bp, Homo sapiens
caagacatccttgcctgca

SEQ ID NO: 4001 - DNA, 19 bp, Homo sapiens
gcaggcaaggatgtcttgt

SEQ ID NO: 4002 - DNA, 19 bp, Homo sapiens
acaagacatccttgcctgc

SEQ ID NO: 4003 - DNA, 19 bp, Homo sapiens
caggcaaggatgtcttgtg

SEQ ID NO: 4004 - DNA, 19 bp, Homo sapiens
cacaagacatccttgcctg

SEQ ID NO: 4005 - DNA, 19 bp, Homo sapiens
aggcaaggatgtcttgtga

SEQ ID NO: 4006 - DNA, 19 bp, Homo sapiens
tcacaagacatccttgcct

SEQ ID NO: 4007 - DNA, 19 bp, Homo sapiens
ggcaaggatgtcttgtgag

SEQ ID NO: 4008 - DNA, 19 bp, Homo sapiens
ctcacaagacatccttgcc

SEQ ID NO: 4009 - DNA, 19 bp, Homo sapiens
gcaaggatgtcttgtgagc

SEQ ID NO: 4010 - DNA, 19 bp, Homo sapiens
gctcacaagacatccttgc

SEQ ID NO: 4011 - DNA, 19 bp, Homo sapiens
caaggatgtcttgtgagca

SEQ ID NO: 4012 - DNA, 19 bp, Homo sapiens
tgctcacaagacatccttg

SEQ ID NO: 4013 - DNA, 19 bp, Homo sapiens
aaggatgtcttgtgagcag

SEQ ID NO: 4014 - DNA, 19 bp, Homo sapiens
ctgctcacaagacatcctt

SEQ ID NO: 4015 - DNA, 19 bp, Homo sapiens
aggatgtcttgtgagcaga

SEQ ID NO: 4016 - DNA, 19 bp, Homo sapiens
tctgctcacaagacatcct

SEQ ID NO: 4017 - DNA, 19 bp, Homo sapiens
ggatgtcttgtgagcagaa

SEQ ID NO: 4018 - DNA, 19 bp, Homo sapiens
ttctgctcacaagacatcc

SEQ ID NO: 4019 - DNA, 19 bp, Homo sapiens
gatgtcttgtgagcagaaa

SEQ ID NO: 4020 - DNA, 19 bp, Homo sapiens
tttctgctcacaagacatc

SEQ ID NO: 4021 - DNA, 19 bp, Homo sapiens
atgtcttgtgagcagaaag

SEQ ID NO: 4022 - DNA, 19 bp, Homo sapiens
ctttctgctcacaagacat

SEQ ID NO: 4023 - DNA, 19 bp, Homo sapiens
tgtcttgtgagcagaaagc

SEQ ID NO: 4024 - DNA, 19 bp, Homo sapiens
gctttctgctcacaagaca

SEQ ID NO: 4025 - DNA, 19 bp, Homo sapiens
gtcttgtgagcagaaagct

SEQ ID NO: 4026 - DNA, 19 bp, Homo sapiens
agctttctgctcacaagac

SEQ ID NO: 4027 - DNA, 19 bp, Homo sapiens
tcttgtgagcagaaagctg

SEQ ID NO: 4028 - DNA, 19 bp, Homo sapiens
cagctttctgctcacaaga

SEQ ID NO: 4029 - DNA, 19 bp, Homo sapiens
cttgtgagcagaaagctga

SEQ ID NO: 4030 - DNA, 19 bp, Homo sapiens
tcagctttctgctcacaag

SEQ ID NO: 4031 - DNA, 19 bp, Homo sapiens
ttgtgagcagaaagctgaa

SEQ ID NO: 4032 - DNA, 19 bp, Homo sapiens
ttcagctttctgctcacaa

SEQ ID NO: 4033 - DNA, 19 bp, Homo sapiens
tgtgagcagaaagctgaag

SEQ ID NO: 4034 - DNA, 19 bp, Homo sapiens
cttcagctttctgctcaca

SEQ ID NO: 4035 - DNA, 19 bp, Homo sapiens
gtgagcagaaagctgaagg

SEQ ID NO: 4036 - DNA, 19 bp, Homo sapiens
ccttcagctttctgctcac

SEQ ID NO: 4037 - DNA, 19 bp, Homo sapiens
tgagcagaaagctgaagga

SEQ ID NO: 4038 - DNA, 19 bp, Homo sapiens
tccttcagctttctgctca

SEQ ID NO: 4039 - DNA, 19 bp, Homo sapiens
gagcagaaagctgaaggac

SEQ ID NO: 4040 - DNA, 19 bp, Homo sapiens
gtccttcagctttctgctc

SEQ ID NO: 4041 - DNA, 19 bp, Homo sapiens
agcagaaagctgaaggaca

SEQ ID NO: 4042 - DNA, 19 bp, Homo sapiens
tgtccttcagctttctgct

SEQ ID NO: 4043 - DNA, 19 bp, Homo sapiens
gcagaaagctgaaggacac

SEQ ID NO: 4044 - DNA, 19 bp, Homo sapiens
gtgtccttcagctttctgc

SEQ ID NO: 4045 - DNA, 19 bp, Homo sapiens
cagaaagctgaaggacaca

SEQ ID NO: 4046 - DNA, 19 bp, Homo sapiens
tgtgtccttcagctttctg

SEQ ID NO: 4047 - DNA, 19 bp, Homo sapiens
agaaagctgaaggacacag

SEQ ID NO: 4048 - DNA, 19 bp, Homo sapiens
ctgtgtccttcagctttct

SEQ ID NO: 4049 - DNA, 19 bp, Homo sapiens
gaaagctgaaggacacagc

SEQ ID NO: 4050 - DNA, 19 bp, Homo sapiens
gctgtgtccttcagctttc

SEQ ID NO: 4051 - DNA, 19 bp, Homo sapiens
aaagctgaaggacacagca

SEQ ID NO: 4052 - DNA, 19 bp, Homo sapiens
tgctgtgtccttcagcttt

SEQ ID NO: 4053 - DNA, 19 bp, Homo sapiens
aagctgaaggacacagcag

SEQ ID NO: 4054 - DNA, 19 bp, Homo sapiens
ctgctgtgtccttcagctt

SEQ ID NO: 4055 - DNA, 19 bp, Homo sapiens
agctgaaggacacagcagt

SEQ ID NO: 4056 - DNA, 19 bp, Homo sapiens
actgctgtgtccttcagct

SEQ ID NO: 4057 - DNA, 19 bp, Homo sapiens
gctgaaggacacagcagtg

SEQ ID NO: 4058 - DNA, 19 bp, Homo sapiens
cactgctgtgtccttcagc

SEQ ID NO: 4059 - DNA, 19 bp, Homo sapiens
ctgaaggacacagcagtgg

SEQ ID NO: 4060 - DNA, 19 bp, Homo sapiens
ccactgctgtgtccttcag

SEQ ID NO: 4061 - DNA, 19 bp, Homo sapiens
tgaaggacacagcagtgga

SEQ ID NO: 4062 - DNA, 19 bp, Homo sapiens
tccactgctgtgtccttca

SEQ ID NO: 4063 - DNA, 19 bp, Homo sapiens
gaaggacacagcagtggat

SEQ ID NO: 4064 - DNA, 19 bp, Homo sapiens
atccactgctgtgtccttc

SEQ ID NO: 4065 - DNA, 19 bp, Homo sapiens
aaggacacagcagtggatc

SEQ ID NO: 4066 - DNA, 19 bp, Homo sapiens
gatccactgctgtgtcctt

SEQ ID NO: 4067 - DNA, 19 bp, Homo sapiens
aggacacagcagtggatct

SEQ ID NO: 4068 - DNA, 19 bp, Homo sapiens
agatccactgctgtgtcct

SEQ ID NO: 4069 - DNA, 19 bp, Homo sapiens
ggacacagcagtggatctt

SEQ ID NO: 4070 - DNA, 19 bp, Homo sapiens
aagatccactgctgtgtcc

SEQ ID NO: 4071 - DNA, 19 bp, Homo sapiens
gacacagcagtggatcttg

SEQ ID NO: 4072 - DNA, 19 bp, Homo sapiens
caagatccactgctgtgtc

SEQ ID NO: 4073 - DNA, 19 bp, Homo sapiens
acacagcagtggatcttgg

SEQ ID NO: 4074 - DNA, 19 bp, Homo sapiens
ccaagatccactgctgtgt

SEQ ID NO: 4075 - DNA, 19 bp, Homo sapiens
cacagcagtggatcttggc

SEQ ID NO: 4076 - DNA, 19 bp, Homo sapiens
gccaagatccactgctgtg

SEQ ID NO: 4077 - DNA, 19 bp, Homo sapiens
acagcagtggatcttggca

SEQ ID NO: 4078 - DNA, 19 bp, Homo sapiens
tgccaagatccactgctgt

SEQ ID NO: 4079 - DNA, 19 bp, Homo sapiens
cagcagtggatcttggcag

SEQ ID NO: 4080 - DNA, 19 bp, Homo sapiens
ctgccaagatccactgctg

SEQ ID NO: 4081 - DNA, 19 bp, Homo sapiens
agcagtggatcttggcagt

SEQ ID NO: 4082 - DNA, 19 bp, Homo sapiens
actgccaagatccactgct

SEQ ID NO: 4083 - DNA, 19 bp, Homo sapiens
gcagtggatcttggcagtt

SEQ ID NO: 4084 - DNA, 19 bp, Homo sapiens
aactgccaagatccactgc

SEQ ID NO: 4085 - DNA, 19 bp, Homo sapiens
cagtggatcttggcagttc

SEQ ID NO: 4086 - DNA, 19 bp, Homo sapiens
gaactgccaagatccactg

SEQ ID NO: 4087 - DNA, 19 bp, Homo sapiens
agtggatcttggcagttca

SEQ ID NO: 4088 - DNA, 19 bp, Homo sapiens
tgaactgccaagatccact

SEQ ID NO: 4089 - DNA, 19 bp, Homo sapiens
gtggatcttggcagttcag

SEQ ID NO: 4090 - DNA, 19 bp, Homo sapiens
ctgaactgccaagatccac

SEQ ID NO: 4091 - DNA, 19 bp, Homo sapiens
tggatcttggcagttcagt

SEQ ID NO: 4092 - DNA, 19 bp, Homo sapiens
actgaactgccaagatcca

SEQ ID NO: 4093 - DNA, 19 bp, Homo sapiens
ggatcttggcagttcagta

SEQ ID NO: 4094 - DNA, 19 bp, Homo sapiens
tactgaactgccaagatcc

SEQ ID NO: 4095 - DNA, 19 bp, Homo sapiens
gatcttggcagttcagtat

SEQ ID NO: 4096 - DNA, 19 bp, Homo sapiens
atactgaactgccaagatc

SEQ ID NO: 4097 - DNA, 19 bp, Homo sapiens
atcttggcagttcagtatc

SEQ ID NO: 4098 - DNA, 19 bp, Homo sapiens
gatactgaactgccaagat

SEQ ID NO: 4099 - DNA, 19 bp, Homo sapiens
tcttggcagttcagtatcg

SEQ ID NO: 4100 - DNA, 19 bp, Homo sapiens
cgatactgaactgccaaga

SEQ ID NO: 4101 - DNA, 19 bp, Homo sapiens
cttggcagttcagtatcga

SEQ ID NO: 4102 - DNA, 19 bp, Homo sapiens
tcgatactgaactgccaag

SEQ ID NO: 4103 - DNA, 19 bp, Homo sapiens
ttggcagttcagtatcgat

SEQ ID NO: 4104 - DNA, 19 bp, Homo sapiens
atcgatactgaactgccaa

SEQ ID NO: 4105 - DNA, 19 bp, Homo sapiens
tggcagttcagtatcgatg

SEQ ID NO: 4106 - DNA, 19 bp, Homo sapiens
catcgatactgaactgcca

SEQ ID NO: 4107 - DNA, 19 bp, Homo sapiens
ggcagttcagtatcgatgg

SEQ ID NO: 4108 - DNA, 19 bp, Homo sapiens
ccatcgatactgaactgcc

SEQ ID NO: 4109 - DNA, 19 bp, Homo sapiens
gcagttcagtatcgatgga

SEQ ID NO: 4110 - DNA, 19 bp, Homo sapiens
tccatcgatactgaactgc

SEQ ID NO: 4111 - DNA, 19 bp, Homo sapiens
cagttcagtatcgatggac

SEQ ID NO: 4112 - DNA, 19 bp, Homo sapiens
gtccatcgatactgaactg

SEQ ID NO: 4113 - DNA, 19 bp, Homo sapiens
agttcagtatcgatggaca

SEQ ID NO: 4114 - DNA, 19 bp, Homo sapiens
tgtccatcgatactgaact

SEQ ID NO: 4115 - DNA, 19 bp, Homo sapiens
gttcagtatcgatggacag

SEQ ID NO: 4116 - DNA, 19 bp, Homo sapiens
ctgtccatcgatactgaac

SEQ ID NO: 4117 - DNA, 19 bp, Homo sapiens
ttcagtatcgatggacaga

SEQ ID NO: 4118 - DNA, 19 bp, Homo sapiens
tctgtccatcgatactgaa

SEQ ID NO: 4119 - DNA, 19 bp, Homo sapiens
tcagtatcgatggacagac

SEQ ID NO: 4120 - DNA, 19 bp, Homo sapiens
gtctgtccatcgatactga

SEQ ID NO: 4121 - DNA, 19 bp, Homo sapiens
cagtatcgatggacagacc

SEQ ID NO: 4122 - DNA, 19 bp, Homo sapiens
ggtctgtccatcgatactg

SEQ ID NO: 4123 - DNA, 19 bp, Homo sapiens
agtatcgatggacagacct

SEQ ID NO: 4124 - DNA, 19 bp, Homo sapiens
aggtctgtccatcgatact

SEQ ID NO: 4125 - DNA, 19 bp, Homo sapiens
gtatcgatggacagacctt

SEQ ID NO: 4126 - DNA, 19 bp, Homo sapiens
aaggtctgtccatcgatac

SEQ ID NO: 4127 - DNA, 19 bp, Homo sapiens
tatcgatggacagaccttc

SEQ ID NO: 4128 - DNA, 19 bp, Homo sapiens
gaaggtctgtccatcgata

SEQ ID NO: 4129 - DNA, 19 bp, Homo sapiens
atcgatggacagaccttcc

SEQ ID NO: 4130 - DNA, 19 bp, Homo sapiens
ggaaggtctgtccatcgat

SEQ ID NO: 4131 - DNA, 19 bp, Homo sapiens
tcgatggacagaccttcct

SEQ ID NO: 4132 - DNA, 19 bp, Homo sapiens
aggaaggtctgtccatcga

SEQ ID NO: 4133 - DNA, 19 bp, Homo sapiens
cgatggacagaccttccta

SEQ ID NO: 4134 - DNA, 19 bp, Homo sapiens
taggaaggtctgtccatcg

SEQ ID NO: 4135 - DNA, 19 bp, Homo sapiens
gatggacagaccttcctac

SEQ ID NO: 4136 - DNA, 19 bp, Homo sapiens
gtaggaaggtctgtccatc

SEQ ID NO: 4137 - DNA, 19 bp, Homo sapiens
atggacagaccttcctact

SEQ ID NO: 4138 - DNA, 19 bp, Homo sapiens
agtaggaaggtctgtccat

SEQ ID NO: 4139 - DNA, 19 bp, Homo sapiens
tggacagaccttcctactc

SEQ ID NO: 4140 - DNA, 19 bp, Homo sapiens
gagtaggaaggtctgtcca

SEQ ID NO: 4141 - DNA, 19 bp, Homo sapiens
ggacagaccttcctactct

SEQ ID NO: 4142 - DNA, 19 bp, Homo sapiens
agagtaggaaggtctgtcc

SEQ ID NO: 4143 - DNA, 19 bp, Homo sapiens
gacagaccttcctactctt

SEQ ID NO: 4144 - DNA, 19 bp, Homo sapiens
aagagtaggaaggtctgtc

SEQ ID NO: 4145 - DNA, 19 bp, Homo sapiens
acagaccttcctactcttt

SEQ ID NO: 4146 - DNA, 19 bp, Homo sapiens
aaagagtaggaaggtctgt

SEQ ID NO: 4147 - DNA, 19 bp, Homo sapiens
cagaccttcctactctttg

SEQ ID NO: 4148 - DNA, 19 bp, Homo sapiens
caaagagtaggaaggtctg

SEQ ID NO: 4149 - DNA, 19 bp, Homo sapiens
agaccttcctactctttga

SEQ ID NO: 4150 - DNA, 19 bp, Homo sapiens
tcaaagagtaggaaggtct

SEQ ID NO: 4151 - DNA, 19 bp, Homo sapiens
gaccttcctactctttgac

SEQ ID NO: 4152 - DNA, 19 bp, Homo sapiens
gtcaaagagtaggaaggtc

SEQ ID NO: 4153 - DNA, 19 bp, Homo sapiens
accttcctactctttgact

SEQ ID NO: 4154 - DNA, 19 bp, Homo sapiens
agtcaaagagtaggaaggt

SEQ ID NO: 4155 - DNA, 19 bp, Homo sapiens
ccttcctactctttgactc

SEQ ID NO: 4156 - DNA, 19 bp, Homo sapiens
gagtcaaagagtaggaagg

SEQ ID NO: 4157 - DNA, 19 bp, Homo sapiens
cttcctactctttgactca

SEQ ID NO: 4158 - DNA, 19 bp, Homo sapiens
tgagtcaaagagtaggaag

SEQ ID NO: 4159 - DNA, 19 bp, Homo sapiens
ttcctactctttgactcag

SEQ ID NO: 4160 - DNA, 19 bp, Homo sapiens
ctgagtcaaagagtaggaa

SEQ ID NO: 4161 - DNA, 19 bp, Homo sapiens
tcctactctttgactcaga

SEQ ID NO: 4162 - DNA, 19 bp, Homo sapiens
tctgagtcaaagagtagga

SEQ ID NO: 4163 - DNA, 19 bp, Homo sapiens
cctactctttgactcagag

SEQ ID NO: 4164 - DNA, 19 bp, Homo sapiens
ctctgagtcaaagagtagg

SEQ ID NO: 4165 - DNA, 19 bp, Homo sapiens
ctactctttgactcagaga

SEQ ID NO: 4166 - DNA, 19 bp, Homo sapiens
tctctgagtcaaagagtag

SEQ ID NO: 4167 - DNA, 19 bp, Homo sapiens
tactctttgactcagagaa

SEQ ID NO: 4168 - DNA, 19 bp, Homo sapiens
ttctctgagtcaaagagta

SEQ ID NO: 4169 - DNA, 19 bp, Homo sapiens
actctttgactcagagaag

SEQ ID NO: 4170 - DNA, 19 bp, Homo sapiens
cttctctgagtcaaagagt

SEQ ID NO: 4171 - DNA, 19 bp, Homo sapiens
ctctttgactcagagaaga

SEQ ID NO: 4172 - DNA, 19 bp, Homo sapiens
tcttctctgagtcaaagag

SEQ ID NO: 4173 - DNA, 19 bp, Homo sapiens
tctttgactcagagaagag

SEQ ID NO: 4174 - DNA, 19 bp, Homo sapiens
ctcttctctgagtcaaaga

SEQ ID NO: 4175 - DNA, 19 bp, Homo sapiens
ctttgactcagagaagaga

SEQ ID NO: 4176 - DNA, 19 bp, Homo sapiens
tctcttctctgagtcaaag

SEQ ID NO: 4177 - DNA, 19 bp, Homo sapiens
tttgactcagagaagagaa

SEQ ID NO: 4178 - DNA, 19 bp, Homo sapiens
ttctcttctctgagtcaaa

SEQ ID NO: 4179 - DNA, 19 bp, Homo sapiens
ttgactcagagaagagaat

SEQ ID NO: 4180 - DNA, 19 bp, Homo sapiens
attctcttctctgagtcaa

SEQ ID NO: 4181 - DNA, 19 bp, Homo sapiens
tgactcagagaagagaatg

SEQ ID NO: 4182 - DNA, 19 bp, Homo sapiens
cattctcttctctgagtca

SEQ ID NO: 4183 - DNA, 19 bp, Homo sapiens
gactcagagaagagaatgt

SEQ ID NO: 4184 - DNA, 19 bp, Homo sapiens
acattctcttctctgagtc

SEQ ID NO: 4185 - DNA, 19 bp, Homo sapiens
actcagagaagagaatgtg

SEQ ID NO: 4186 - DNA, 19 bp, Homo sapiens
cacattctcttctctgagt

SEQ ID NO: 4187 - DNA, 19 bp, Homo sapiens
ctcagagaagagaatgtgg

SEQ ID NO: 4188 - DNA, 19 bp, Homo sapiens
ccacattctcttctctgag

SEQ ID NO: 4189 - DNA, 19 bp, Homo sapiens
tcagagaagagaatgtgga

SEQ ID NO: 4190 - DNA, 19 bp, Homo sapiens
tccacattctcttctctga

SEQ ID NO: 4191 - DNA, 19 bp, Homo sapiens
cagagaagagaatgtggac

SEQ ID NO: 4192 - DNA, 19 bp, Homo sapiens
gtccacattctcttctctg

SEQ ID NO: 4193 - DNA, 19 bp, Homo sapiens
agagaagagaatgtggaca

SEQ ID NO: 4194 - DNA, 19 bp, Homo sapiens
tgtccacattctcttctct

SEQ ID NO: 4195 - DNA, 19 bp, Homo sapiens
gagaagagaatgtggacaa

SEQ ID NO: 4196 - DNA, 19 bp, Homo sapiens
ttgtccacattctcttctc

SEQ ID NO: 4197 - DNA, 19 bp, Homo sapiens
agaagagaatgtggacaac

SEQ ID NO: 4198 - DNA, 19 bp, Homo sapiens
gttgtccacattctcttct

SEQ ID NO: 4199 - DNA, 19 bp, Homo sapiens
gaagagaatgtggacaacg

SEQ ID NO: 4200 - DNA, 19 bp, Homo sapiens
cgttgtccacattctcttc

SEQ ID NO: 4201 - DNA, 19 bp, Homo sapiens
aagagaatgtggacaacgg

SEQ ID NO: 4202 - DNA, 19 bp, Homo sapiens
ccgttgtccacattctctt

SEQ ID NO: 4203 - DNA, 19 bp, Homo sapiens
agagaatgtggacaacggt

SEQ ID NO: 4204 - DNA, 19 bp, Homo sapiens
accgttgtccacattctct

SEQ ID NO: 4205 - DNA, 19 bp, Homo sapiens
gagaatgtggacaacggtt

SEQ ID NO: 4206 - DNA, 19 bp, Homo sapiens
aaccgttgtccacattctc

SEQ ID NO: 4207 - DNA, 19 bp, Homo sapiens
agaatgtggacaacggttc

SEQ ID NO: 4208 - DNA, 19 bp, Homo sapiens
gaaccgttgtccacattct

SEQ ID NO: 4209 - DNA, 19 bp, Homo sapiens
gaatgtggacaacggttca

SEQ ID NO: 4210 - DNA, 19 bp, Homo sapiens
tgaaccgttgtccacattc

SEQ ID NO: 4211 - DNA, 19 bp, Homo sapiens
aatgtggacaacggttcat

SEQ ID NO: 4212 - DNA, 19 bp, Homo sapiens
atgaaccgttgtccacatt

SEQ ID NO: 4213 - DNA, 19 bp, Homo sapiens
atgtggacaacggttcatc

SEQ ID NO: 4214 - DNA, 19 bp, Homo sapiens
gatgaaccgttgtccacat

SEQ ID NO: 4215 - DNA, 19 bp, Homo sapiens
tgtggacaacggttcatcc

SEQ ID NO: 4216 - DNA, 19 bp, Homo sapiens
ggatgaaccgttgtccaca

SEQ ID NO: 4217 - DNA, 19 bp, Homo sapiens
gtggacaacggttcatcct

SEQ ID NO: 4218 - DNA, 19 bp, Homo sapiens
aggatgaaccgttgtccac

SEQ ID NO: 4219 - DNA, 19 bp, Homo sapiens
tggacaacggttcatcctg

SEQ ID NO: 4220 - DNA, 19 bp, Homo sapiens
caggatgaaccgttgtcca

SEQ ID NO: 4221 - DNA, 19 bp, Homo sapiens
ggacaacggttcatcctgg

SEQ ID NO: 4222 - DNA, 19 bp, Homo sapiens
ccaggatgaaccgttgtcc

SEQ ID NO: 4223 - DNA, 19 bp, Homo sapiens
gacaacggttcatcctgga

SEQ ID NO: 4224 - DNA, 19 bp, Homo sapiens
tccaggatgaaccgttgtc

SEQ ID NO: 4225 - DNA, 19 bp, Homo sapiens
acaacggttcatcctggag

SEQ ID NO: 4226 - DNA, 19 bp, Homo sapiens
ctccaggatgaaccgttgt

SEQ ID NO: 4227 - DNA, 19 bp, Homo sapiens
caacggttcatcctggagc

SEQ ID NO: 4228 - DNA, 19 bp, Homo sapiens
gctccaggatgaaccgttg

SEQ ID NO: 4229 - DNA, 19 bp, Homo sapiens
aacggttcatcctggagcc

SEQ ID NO: 4230 - DNA, 19 bp, Homo sapiens
ggctccaggatgaaccgtt

SEQ ID NO: 4231 - DNA, 19 bp, Homo sapiens
acggttcatcctggagcca

SEQ ID NO: 4232 - DNA, 19 bp, Homo sapiens
tggctccaggatgaaccgt

SEQ ID NO: 4233 - DNA, 19 bp, Homo sapiens
cggttcatcctggagccag

SEQ ID NO: 4234 - DNA, 19 bp, Homo sapiens
ctggctccaggatgaaccg

SEQ ID NO: 4235 - DNA, 19 bp, Homo sapiens
ggttcatcctggagccaga

SEQ ID NO: 4236 - DNA, 19 bp, Homo sapiens
tctggctccaggatgaacc

SEQ ID NO: 4237 - DNA, 19 bp, Homo sapiens
gttcatcctggagccagaa

SEQ ID NO: 4238 - DNA, 19 bp, Homo sapiens
ttctggctccaggatgaac

SEQ ID NO: 4239 - DNA, 19 bp, Homo sapiens
ttcatcctggagccagaaa

SEQ ID NO: 4240 - DNA, 19 bp, Homo sapiens
tttctggctccaggatgaa

SEQ ID NO: 4241 - DNA, 19 bp, Homo sapiens
tcatcctggagccagaaag

SEQ ID NO: 4242 - DNA, 19 bp, Homo sapiens
ctttctggctccaggatga

SEQ ID NO: 4243 - DNA, 19 bp, Homo sapiens
catcctggagccagaaaga

SEQ ID NO: 4244 - DNA, 19 bp, Homo sapiens
tctttctggctccaggatg

SEQ ID NO: 4245 - DNA, 19 bp, Homo sapiens
atcctggagccagaaagat

SEQ ID NO: 4246 - DNA, 19 bp, Homo sapiens
atctttctggctccaggat

SEQ ID NO: 4247 - DNA, 19 bp, Homo sapiens
tcctggagccagaaagatg

SEQ ID NO: 4248 - DNA, 19 bp, Homo sapiens
catctttctggctccagga

SEQ ID NO: 4249 - DNA, 19 bp, Homo sapiens
cctggagccagaaagatga

SEQ ID NO: 4250 - DNA, 19 bp, Homo sapiens
tcatctttctggctccagg

SEQ ID NO: 4251 - DNA, 19 bp, Homo sapiens
ctggagccagaaagatgaa

SEQ ID NO: 4252 - DNA, 19 bp, Homo sapiens
ttcatctttctggctccag

SEQ ID NO: 4253 - DNA, 19 bp, Homo sapiens
tggagccagaaagatgaaa

SEQ ID NO: 4254 - DNA, 19 bp, Homo sapiens
tttcatctttctggctcca

SEQ ID NO: 4255 - DNA, 19 bp, Homo sapiens
ggagccagaaagatgaaag

SEQ ID NO: 4256 - DNA, 19 bp, Homo sapiens
ctttcatctttctggctcc

SEQ ID NO: 4257 - DNA, 19 bp, Homo sapiens
gagccagaaagatgaaaga

SEQ ID NO: 4258 - DNA, 19 bp, Homo sapiens
tctttcatctttctggctc

SEQ ID NO: 4259 - DNA, 19 bp, Homo sapiens
agccagaaagatgaaagaa

SEQ ID NO: 4260 - DNA, 19 bp, Homo sapiens
ttctttcatctttctggct

SEQ ID NO: 4261 - DNA, 19 bp, Homo sapiens
gccagaaagatgaaagaaa

SEQ ID NO: 4262 - DNA, 19 bp, Homo sapiens
tttctttcatctttctggc

SEQ ID NO: 4263 - DNA, 19 bp, Homo sapiens
ccagaaagatgaaagaaaa

SEQ ID NO: 4264 - DNA, 19 bp, Homo sapiens
ttttctttcatctttctgg

SEQ ID NO: 4265 - DNA, 19 bp, Homo sapiens
cagaaagatgaaagaaaag

SEQ ID NO: 4266 - DNA, 19 bp, Homo sapiens
cttttctttcatctttctg

SEQ ID NO: 4267 - DNA, 19 bp, Homo sapiens
agaaagatgaaagaaaagt

SEQ ID NO: 4268 - DNA, 19 bp, Homo sapiens
acttttctttcatctttct

SEQ ID NO: 4269 - DNA, 19 bp, Homo sapiens
gaaagatgaaagaaaagtg

SEQ ID NO: 4270 - DNA, 19 bp, Homo sapiens
cacttttctttcatctttc

SEQ ID NO: 4271 - DNA, 19 bp, Homo sapiens
aaagatgaaagaaaagtgg

SEQ ID NO: 4272 - DNA, 19 bp, Homo sapiens
ccacttttctttcatcttt

SEQ ID NO: 4273 - DNA, 19 bp, Homo sapiens
aagatgaaagaaaagtggg

SEQ ID NO: 4274 - DNA, 19 bp, Homo sapiens
cccacttttctttcatctt

SEQ ID NO: 4275 - DNA, 19 bp, Homo sapiens
agatgaaagaaaagtggga

SEQ ID NO: 4276 - DNA, 19 bp, Homo sapiens
tcccacttttctttcatct

SEQ ID NO: 4277 - DNA, 19 bp, Homo sapiens
gatgaaagaaaagtgggag

SEQ ID NO: 4278 - DNA, 19 bp, Homo sapiens
ctcccacttttctttcatc

SEQ ID NO: 4279 - DNA, 19 bp, Homo sapiens
atgaaagaaaagtgggaga

SEQ ID NO: 4280 - DNA, 19 bp, Homo sapiens
tctcccacttttctttcat

SEQ ID NO: 4281 - DNA, 19 bp, Homo sapiens
tgaaagaaaagtgggagaa

SEQ ID NO: 4282 - DNA, 19 bp, Homo sapiens
ttctcccacttttctttca

SEQ ID NO: 4283 - DNA, 19 bp, Homo sapiens
gaaagaaaagtgggagaat

SEQ ID NO: 4284 - DNA, 19 bp, Homo sapiens
attctcccacttttctttc

SEQ ID NO: 4285 - DNA, 19 bp, Homo sapiens
aaagaaaagtgggagaatg

SEQ ID NO: 4286 - DNA, 19 bp, Homo sapiens
cattctcccacttttcttt

SEQ ID NO: 4287 - DNA, 19 bp, Homo sapiens
aagaaaagtgggagaatga

SEQ ID NO: 4288 - DNA, 19 bp, Homo sapiens
tcattctcccacttttctt

SEQ ID NO: 4289 - DNA, 19 bp, Homo sapiens
agaaaagtgggagaatgac

SEQ ID NO: 4290 - DNA, 19 bp, Homo sapiens
gtcattctcccacttttct

SEQ ID NO: 4291 - DNA, 19 bp, Homo sapiens
gaaaagtgggagaatgaca

SEQ ID NO: 4292 - DNA, 19 bp, Homo sapiens
tgtcattctcccacttttc

SEQ ID NO: 4293 - DNA, 19 bp, Homo sapiens
aaaagtgggagaatgacaa

SEQ ID NO: 4294 - DNA, 19 bp, Homo sapiens
ttgtcattctcccactttt

SEQ ID NO: 4295 - DNA, 19 bp, Homo sapiens
aaagtgggagaatgacaag

SEQ ID NO: 4296 - DNA, 19 bp, Homo sapiens
cttgtcattctcccacttt

SEQ ID NO: 4297 - DNA, 19 bp, Homo sapiens
aagtgggagaatgacaagg

SEQ ID NO: 4298 - DNA, 19 bp, Homo sapiens
ccttgtcattctcccactt

SEQ ID NO: 4299 - DNA, 19 bp, Homo sapiens
agtgggagaatgacaagga

SEQ ID NO: 4300 - DNA, 19 bp, Homo sapiens
tccttgtcattctcccact

SEQ ID NO: 4301 - DNA, 19 bp, Homo sapiens
gtgggagaatgacaaggat

SEQ ID NO: 4302 - DNA, 19 bp, Homo sapiens
atccttgtcattctcccac

SEQ ID NO: 4303 - DNA, 19 bp, Homo sapiens
tgggagaatgacaaggatg

SEQ ID NO: 4304 - DNA, 19 bp, Homo sapiens
catccttgtcattctccca

SEQ ID NO: 4305 - DNA, 19 bp, Homo sapiens
gggagaatgacaaggatgt

SEQ ID NO: 4306 - DNA, 19 bp, Homo sapiens
acatccttgtcattctccc

SEQ ID NO: 4307 - DNA, 19 bp, Homo sapiens
ggagaatgacaaggatgtg

SEQ ID NO: 4308 - DNA, 19 bp, Homo sapiens
cacatccttgtcattctcc

SEQ ID NO: 4309 - DNA, 19 bp, Homo sapiens
gagaatgacaaggatgtgg

SEQ ID NO: 4310 - DNA, 19 bp, Homo sapiens
ccacatccttgtcattctc

SEQ ID NO: 4311 - DNA, 19 bp, Homo sapiens
agaatgacaaggatgtggc

SEQ ID NO: 4312 - DNA, 19 bp, Homo sapiens
gccacatccttgtcattct

SEQ ID NO: 4313 - DNA, 19 bp, Homo sapiens
gaatgacaaggatgtggcc

SEQ ID NO: 4314 - DNA, 19 bp, Homo sapiens
ggccacatccttgtcattc

SEQ ID NO: 4315 - DNA, 19 bp, Homo sapiens
aatgacaaggatgtggcca

SEQ ID NO: 4316 - DNA, 19 bp, Homo sapiens
tggccacatccttgtcatt

SEQ ID NO: 4317 - DNA, 19 bp, Homo sapiens
atgacaaggatgtggccat

SEQ ID NO: 4318 - DNA, 19 bp, Homo sapiens
atggccacatccttgtcat

SEQ ID NO: 4319 - DNA, 19 bp, Homo sapiens
tgacaaggatgtggccatg

SEQ ID NO: 4320 - DNA, 19 bp, Homo sapiens
catggccacatccttgtca

SEQ ID NO: 4321 - DNA, 19 bp, Homo sapiens
gacaaggatgtggccatgt

SEQ ID NO: 4322 - DNA, 19 bp, Homo sapiens
acatggccacatccttgtc

SEQ ID NO: 4323 - DNA, 19 bp, Homo sapiens
acaaggatgtggccatgtc

SEQ ID NO: 4324 - DNA, 19 bp, Homo sapiens
gacatggccacatccttgt

SEQ ID NO: 4325 - DNA, 19 bp, Homo sapiens
caaggatgtggccatgtcc

SEQ ID NO: 4326 - DNA, 19 bp, Homo sapiens
ggacatggccacatccttg

SEQ ID NO: 4327 - DNA, 19 bp, Homo sapiens
aaggatgtggccatgtcct

SEQ ID NO: 4328 - DNA, 19 bp, Homo sapiens
aggacatggccacatcctt

SEQ ID NO: 4329 - DNA, 19 bp, Homo sapiens
aggatgtggccatgtcctt

SEQ ID NO: 4330 - DNA, 19 bp, Homo sapiens
aaggacatggccacatcct

SEQ ID NO: 4331 - DNA, 19 bp, Homo sapiens
ggatgtggccatgtccttc

SEQ ID NO: 4332 - DNA, 19 bp, Homo sapiens
gaaggacatggccacatcc

SEQ ID NO: 4333 - DNA, 19 bp, Homo sapiens
gatgtggccatgtccttcc

SEQ ID NO: 4334 - DNA, 19 bp, Homo sapiens
ggaaggacatggccacatc

SEQ ID NO: 4335 - DNA, 19 bp, Homo sapiens
atgtggccatgtccttcca

SEQ ID NO: 4336 - DNA, 19 bp, Homo sapiens
tggaaggacatggccacat

SEQ ID NO: 4337 - DNA, 19 bp, Homo sapiens
tgtggccatgtccttccat

SEQ ID NO: 4338 - DNA, 19 bp, Homo sapiens
atggaaggacatggccaca

SEQ ID NO: 4339 - DNA, 19 bp, Homo sapiens
gtggccatgtccttccatt

SEQ ID NO: 4340 - DNA, 19 bp, Homo sapiens
aatggaaggacatggccac

SEQ ID NO: 4341 - DNA, 19 bp, Homo sapiens
tggccatgtccttccatta

SEQ ID NO: 4342 - DNA, 19 bp, Homo sapiens
taatggaaggacatggcca

SEQ ID NO: 4343 - DNA, 19 bp, Homo sapiens
ggccatgtccttccattac

SEQ ID NO: 4344 - DNA, 19 bp, Homo sapiens
gtaatggaaggacatggcc

SEQ ID NO: 4345 - DNA, 19 bp, Homo sapiens
gccatgtccttccattaca

SEQ ID NO: 4346 - DNA, 19 bp, Homo sapiens
tgtaatggaaggacatggc

SEQ ID NO: 4347 - DNA, 19 bp, Homo sapiens
ccatgtccttccattacat

SEQ ID NO: 4348 - DNA, 19 bp, Homo sapiens
atgtaatggaaggacatgg

SEQ ID NO: 4349 - DNA, 19 bp, Homo sapiens
catgtccttccattacatc

SEQ ID NO: 4350 - DNA, 19 bp, Homo sapiens
gatgtaatggaaggacatg

SEQ ID NO: 4351 - DNA, 19 bp, Homo sapiens
atgtccttccattacatct

SEQ ID NO: 4352 - DNA, 19 bp, Homo sapiens
agatgtaatggaaggacat

SEQ ID NO: 4353 - DNA, 19 bp, Homo sapiens
tgtccttccattacatctc

SEQ ID NO: 4354 - DNA, 19 bp, Homo sapiens
gagatgtaatggaaggaca

SEQ ID NO: 4355 - DNA, 19 bp, Homo sapiens
gtccttccattacatctca

SEQ ID NO: 4356 - DNA, 19 bp, Homo sapiens
tgagatgtaatggaaggac

SEQ ID NO: 4357 - DNA, 19 bp, Homo sapiens
tccttccattacatctcaa

SEQ ID NO: 4358 - DNA, 19 bp, Homo sapiens
ttgagatgtaatggaagga

SEQ ID NO: 4359 - DNA, 19 bp, Homo sapiens
ccttccattacatctcaat

SEQ ID NO: 4360 - DNA, 19 bp, Homo sapiens
attgagatgtaatggaagg

SEQ ID NO: 4361 - DNA, 19 bp, Homo sapiens
cttccattacatctcaatg

SEQ ID NO: 4362 - DNA, 19 bp, Homo sapiens
cattgagatgtaatggaag

SEQ ID NO: 4363 - DNA, 19 bp, Homo sapiens
ttccattacatctcaatgg

SEQ ID NO: 4364 - DNA, 19 bp, Homo sapiens
ccattgagatgtaatggaa

SEQ ID NO: 4365 - DNA, 19 bp, Homo sapiens
tccattacatctcaatggg

SEQ ID NO: 4366 - DNA, 19 bp, Homo sapiens
cccattgagatgtaatgga

SEQ ID NO: 4367 - DNA, 19 bp, Homo sapiens
ccattacatctcaatggga

SEQ ID NO: 4368 - DNA, 19 bp, Homo sapiens
tcccattgagatgtaatgg

SEQ ID NO: 4369 - DNA, 19 bp, Homo sapiens
cattacatctcaatgggag

SEQ ID NO: 4370 - DNA, 19 bp, Homo sapiens
ctcccattgagatgtaatg

SEQ ID NO: 4371 - DNA, 19 bp, Homo sapiens
attacatctcaatgggaga

SEQ ID NO: 4372 - DNA, 19 bp, Homo sapiens
tctcccattgagatgtaat

SEQ ID NO: 4373 - DNA, 19 bp, Homo sapiens
ttacatctcaatgggagac

SEQ ID NO: 4374 - DNA, 19 bp, Homo sapiens
gtctcccattgagatgtaa

SEQ ID NO: 4375 - DNA, 19 bp, Homo sapiens
tacatctcaatgggagact

SEQ ID NO: 4376 - DNA, 19 bp, Homo sapiens
agtctcccattgagatgta

SEQ ID NO: 4377 - DNA, 19 bp, Homo sapiens
acatctcaatgggagactg

SEQ ID NO: 4378 - DNA, 19 bp, Homo sapiens
cagtctcccattgagatgt

SEQ ID NO: 4379 - DNA, 19 bp, Homo sapiens
catctcaatgggagactgc

SEQ ID NO: 4380 - DNA, 19 bp, Homo sapiens
gcagtctcccattgagatg

SEQ ID NO: 4381 - DNA, 19 bp, Homo sapiens
atctcaatgggagactgca

SEQ ID NO: 4382 - DNA, 19 bp, Homo sapiens
tgcagtctcccattgagat

SEQ ID NO: 4383 - DNA, 19 bp, Homo sapiens
tctcaatgggagactgcat

SEQ ID NO: 4384 - DNA, 19 bp, Homo sapiens
atgcagtctcccattgaga

SEQ ID NO: 4385 - DNA, 19 bp, Homo sapiens
ctcaatgggagactgcata

SEQ ID NO: 4386 - DNA, 19 bp, Homo sapiens
tatgcagtctcccattgag

SEQ ID NO: 4387 - DNA, 19 bp, Homo sapiens
tcaatgggagactgcatag

SEQ ID NO: 4388 - DNA, 19 bp, Homo sapiens
ctatgcagtctcccattga

SEQ ID NO: 4389 - DNA, 19 bp, Homo sapiens
caatgggagactgcatagg

SEQ ID NO: 4390 - DNA, 19 bp, Homo sapiens
cctatgcagtctcccattg

SEQ ID NO: 4391 - DNA, 19 bp, Homo sapiens
aatgggagactgcatagga

SEQ ID NO: 4392 - DNA, 19 bp, Homo sapiens
tcctatgcagtctcccatt

SEQ ID NO: 4393 - DNA, 19 bp, Homo sapiens
atgggagactgcataggat

SEQ ID NO: 4394 - DNA, 19 bp, Homo sapiens
atcctatgcagtctcccat

SEQ ID NO: 4395 - DNA, 19 bp, Homo sapiens
tgggagactgcataggatg

SEQ ID NO: 4396 - DNA, 19 bp, Homo sapiens
catcctatgcagtctccca

SEQ ID NO: 4397 - DNA, 19 bp, Homo sapiens
gggagactgcataggatgg

SEQ ID NO: 4398 - DNA, 19 bp, Homo sapiens
ccatcctatgcagtctccc

SEQ ID NO: 4399 - DNA, 19 bp, Homo sapiens
ggagactgcataggatggc

SEQ ID NO: 4400 - DNA, 19 bp, Homo sapiens
gccatcctatgcagtctcc

SEQ ID NO: 4401 - DNA, 19 bp, Homo sapiens
gagactgcataggatggct

SEQ ID NO: 4402 - DNA, 19 bp, Homo sapiens
agccatcctatgcagtctc

SEQ ID NO: 4403 - DNA, 19 bp, Homo sapiens
agactgcataggatggctt

SEQ ID NO: 4404 - DNA, 19 bp, Homo sapiens
aagccatcctatgcagtct

SEQ ID NO: 4405 - DNA, 19 bp, Homo sapiens
gactgcataggatggcttg

SEQ ID NO: 4406 - DNA, 19 bp, Homo sapiens
caagccatcctatgcagtc

SEQ ID NO: 4407 - DNA, 19 bp, Homo sapiens
actgcataggatggcttga

SEQ ID NO: 4408 - DNA, 19 bp, Homo sapiens
tcaagccatcctatgcagt

SEQ ID NO: 4409 - DNA, 19 bp, Homo sapiens
ctgcataggatggcttgag

SEQ ID NO: 4410 - DNA, 19 bp, Homo sapiens
ctcaagccatcctatgcag

SEQ ID NO: 4411 - DNA, 19 bp, Homo sapiens
tgcataggatggcttgagg

SEQ ID NO: 4412 - DNA, 19 bp, Homo sapiens
cctcaagccatcctatgca

SEQ ID NO: 4413 - DNA, 19 bp, Homo sapiens
gcataggatggcttgagga

SEQ ID NO: 4414 - DNA, 19 bp, Homo sapiens
tcctcaagccatcctatgc

SEQ ID NO: 4415 - DNA, 19 bp, Homo sapiens
cataggatggcttgaggac

SEQ ID NO: 4416 - DNA, 19 bp, Homo sapiens
gtcctcaagccatcctatg

SEQ ID NO: 4417 - DNA, 19 bp, Homo sapiens
ataggatggcttgaggact

SEQ ID NO: 4418 - DNA, 19 bp, Homo sapiens
agtcctcaagccatcctat

SEQ ID NO: 4419 - DNA, 19 bp, Homo sapiens
taggatggcttgaggactt

SEQ ID NO: 4420 - DNA, 19 bp, Homo sapiens
aagtcctcaagccatccta

SEQ ID NO: 4421 - DNA, 19 bp, Homo sapiens
aggatggcttgaggacttc

SEQ ID NO: 4422 - DNA, 19 bp, Homo sapiens
gaagtcctcaagccatcct

SEQ ID NO: 4423 - DNA, 19 bp, Homo sapiens
ggatggcttgaggacttct

SEQ ID NO: 4424 - DNA, 19 bp, Homo sapiens
agaagtcctcaagccatcc

SEQ ID NO: 4425 - DNA, 19 bp, Homo sapiens
gatggcttgaggacttctt

SEQ ID NO: 4426 - DNA, 19 bp, Homo sapiens
aagaagtcctcaagccatc

SEQ ID NO: 4427 - DNA, 19 bp, Homo sapiens
atggcttgaggacttcttg

SEQ ID NO: 4428 - DNA, 19 bp, Homo sapiens
caagaagtcctcaagccat

SEQ ID NO: 4429 - DNA, 19 bp, Homo sapiens
tggcttgaggacttcttga

SEQ ID NO: 4430 - DNA, 19 bp, Homo sapiens
tcaagaagtcctcaagcca

SEQ ID NO: 4431 - DNA, 19 bp, Homo sapiens
ggcttgaggacttcttgat

SEQ ID NO: 4432 - DNA, 19 bp, Homo sapiens
atcaagaagtcctcaagcc

SEQ ID NO: 4433 - DNA, 19 bp, Homo sapiens
gcttgaggacttcttgatg

SEQ ID NO: 4434 - DNA, 19 bp, Homo sapiens
catcaagaagtcctcaagc

SEQ ID NO: 4435 - DNA, 19 bp, Homo sapiens
cttgaggacttcttgatgg

SEQ ID NO: 4436 - DNA, 19 bp, Homo sapiens
ccatcaagaagtcctcaag

SEQ ID NO: 4437 - DNA, 19 bp, Homo sapiens
ttgaggacttcttgatggg

SEQ ID NO: 4438 - DNA, 19 bp, Homo sapiens
cccatcaagaagtcctcaa

SEQ ID NO: 4439 - DNA, 19 bp, Homo sapiens
tgaggacttcttgatgggc

SEQ ID NO: 4440 - DNA, 19 bp, Homo sapiens
gcccatcaagaagtcctca

SEQ ID NO: 4441 - DNA, 19 bp, Homo sapiens
gaggacttcttgatgggca

SEQ ID NO: 4442 - DNA, 19 bp, Homo sapiens
tgcccatcaagaagtcctc

SEQ ID NO: 4443 - DNA, 19 bp, Homo sapiens
aggacttcttgatgggcat

SEQ ID NO: 4444 - DNA, 19 bp, Homo sapiens
atgcccatcaagaagtcct

SEQ ID NO: 4445 - DNA, 19 bp, Homo sapiens
ggacttcttgatgggcatg

SEQ ID NO: 4446 - DNA, 19 bp, Homo sapiens
catgcccatcaagaagtcc

SEQ ID NO: 4447 - DNA, 19 bp, Homo sapiens
gacttcttgatgggcatgg

SEQ ID NO: 4448 - DNA, 19 bp, Homo sapiens
ccatgcccatcaagaagtc

SEQ ID NO: 4449 - DNA, 19 bp, Homo sapiens
acttcttgatgggcatgga

SEQ ID NO: 4450 - DNA, 19 bp, Homo sapiens
tccatgcccatcaagaagt

SEQ ID NO: 4451 - DNA, 19 bp, Homo sapiens
cttcttgatgggcatggac

SEQ ID NO: 4452 - DNA, 19 bp, Homo sapiens
gtccatgcccatcaagaag

SEQ ID NO: 4453 - DNA, 19 bp, Homo sapiens
ttcttgatgggcatggaca

SEQ ID NO: 4454 - DNA, 19 bp, Homo sapiens
tgtccatgcccatcaagaa

SEQ ID NO: 4455 - DNA, 19 bp, Homo sapiens
tcttgatgggcatggacag

SEQ ID NO: 4456 - DNA, 19 bp, Homo sapiens
ctgtccatgcccatcaaga

SEQ ID NO: 4457 - DNA, 19 bp, Homo sapiens
cttgatgggcatggacagc

SEQ ID NO: 4458 - DNA, 19 bp, Homo sapiens
gctgtccatgcccatcaag

SEQ ID NO: 4459 - DNA, 19 bp, Homo sapiens
ttgatgggcatggacagca

SEQ ID NO: 4460 - DNA, 19 bp, Homo sapiens
tgctgtccatgcccatcaa

SEQ ID NO: 4461 - DNA, 19 bp, Homo sapiens
tgatgggcatggacagcac

SEQ ID NO: 4462 - DNA, 19 bp, Homo sapiens
gtgctgtccatgcccatca

SEQ ID NO: 4463 - DNA, 19 bp, Homo sapiens
gatgggcatggacagcacc

SEQ ID NO: 4464 - DNA, 19 bp, Homo sapiens
ggtgctgtccatgcccatc

SEQ ID NO: 4465 - DNA, 19 bp, Homo sapiens
atgggcatggacagcaccc

SEQ ID NO: 4466 - DNA, 19 bp, Homo sapiens
gggtgctgtccatgcccat

SEQ ID NO: 4467 - DNA, 19 bp, Homo sapiens
tgggcatggacagcaccct

SEQ ID NO: 4468 - DNA, 19 bp, Homo sapiens
agggtgctgtccatgccca

SEQ ID NO: 4469 - DNA, 19 bp, Homo sapiens
gggcatggacagcaccctg

SEQ ID NO: 4470 - DNA, 19 bp, Homo sapiens
cagggtgctgtccatgccc

SEQ ID NO: 4471 - DNA, 19 bp, Homo sapiens
ggcatggacagcaccctgg

SEQ ID NO: 4472 - DNA, 19 bp, Homo sapiens
ccagggtgctgtccatgcc

SEQ ID NO: 4473 - DNA, 19 bp, Homo sapiens
gcatggacagcaccctgga

SEQ ID NO: 4474 - DNA, 19 bp, Homo sapiens
tccagggtgctgtccatgc

SEQ ID NO: 4475 - DNA, 19 bp, Homo sapiens
catggacagcaccctggag

SEQ ID NO: 4476 - DNA, 19 bp, Homo sapiens
ctccagggtgctgtccatg

SEQ ID NO: 4477 - DNA, 19 bp, Homo sapiens
atggacagcaccctggagc

SEQ ID NO: 4478 - DNA, 19 bp, Homo sapiens
gctccagggtgctgtccat

SEQ ID NO: 4479 - DNA, 19 bp, Homo sapiens
tggacagcaccctggagcc

SEQ ID NO: 4480 - DNA, 19 bp, Homo sapiens
ggctccagggtgctgtcca

SEQ ID NO: 4481 - DNA, 19 bp, Homo sapiens
ggacagcaccctggagcca

SEQ ID NO: 4482 - DNA, 19 bp, Homo sapiens
tggctccagggtgctgtcc

SEQ ID NO: 4483 - DNA, 19 bp, Homo sapiens
gacagcaccctggagccaa

SEQ ID NO: 4484 - DNA, 19 bp, Homo sapiens
ttggctccagggtgctgtc

SEQ ID NO: 4485 - DNA, 19 bp, Homo sapiens
acagcaccctggagccaag

SEQ ID NO: 4486 - DNA, 19 bp, Homo sapiens
cttggctccagggtgctgt

SEQ ID NO: 4487 - DNA, 19 bp, Homo sapiens
cagcaccctggagccaagt

SEQ ID NO: 4488 - DNA, 19 bp, Homo sapiens
acttggctccagggtgctg

SEQ ID NO: 4489 - DNA, 19 bp, Homo sapiens
agcaccctggagccaagtg

SEQ ID NO: 4490 - DNA, 19 bp, Homo sapiens
cacttggctccagggtgct

SEQ ID NO: 4491 - DNA, 19 bp, Homo sapiens
gcaccctggagccaagtgc

SEQ ID NO: 4492 - DNA, 19 bp, Homo sapiens
gcacttggctccagggtgc

SEQ ID NO: 4493 - DNA, 19 bp, Homo sapiens
caccctggagccaagtgca

SEQ ID NO: 4494 - DNA, 19 bp, Homo sapiens
tgcacttggctccagggtg

SEQ ID NO: 4495 - DNA, 19 bp, Homo sapiens
accctggagccaagtgcag

SEQ ID NO: 4496 - DNA, 19 bp, Homo sapiens
ctgcacttggctccagggt

SEQ ID NO: 4497 - DNA, 19 bp, Homo sapiens
ccctggagccaagtgcagg

SEQ ID NO: 4498 - DNA, 19 bp, Homo sapiens
cctgcacttggctccaggg

SEQ ID NO: 4499 - DNA, 19 bp, Homo sapiens
cctggagccaagtgcagga

SEQ ID NO: 4500 - DNA, 19 bp, Homo sapiens
tcctgcacttggctccagg

SEQ ID NO: 4501 - DNA, 19 bp, Homo sapiens
ctggagccaagtgcaggag

SEQ ID NO: 4502 - DNA, 19 bp, Homo sapiens
ctcctgcacttggctccag

SEQ ID NO: 4503 - DNA, 19 bp, Homo sapiens
tggagccaagtgcaggagc

SEQ ID NO: 4504 - DNA, 19 bp, Homo sapiens
gctcctgcacttggctcca

SEQ ID NO: 4505 - DNA, 19 bp, Homo sapiens
ggagccaagtgcaggagca

SEQ ID NO: 4506 - DNA, 19 bp, Homo sapiens
tgctcctgcacttggctcc

SEQ ID NO: 4507 - DNA, 19 bp, Homo sapiens
gagccaagtgcaggagcac

SEQ ID NO: 4508 - DNA, 19 bp, Homo sapiens
gtgctcctgcacttggctc

SEQ ID NO: 4509 - DNA, 19 bp, Homo sapiens
agccaagtgcaggagcacc

SEQ ID NO: 4510 - DNA, 19 bp, Homo sapiens
ggtgctcctgcacttggct

SEQ ID NO: 4511 - DNA, 19 bp, Homo sapiens
gccaagtgcaggagcacca

SEQ ID NO: 4512 - DNA, 19 bp, Homo sapiens
tggtgctcctgcacttggc

SEQ ID NO: 4513 - DNA, 19 bp, Homo sapiens
ccaagtgcaggagcaccac

SEQ ID NO: 4514 - DNA, 19 bp, Homo sapiens
gtggtgctcctgcacttgg

SEQ ID NO: 4515 - DNA, 19 bp, Homo sapiens
caagtgcaggagcaccact

SEQ ID NO: 4516 - DNA, 19 bp, Homo sapiens
agtggtgctcctgcacttg

SEQ ID NO: 4517 - DNA, 19 bp, Homo sapiens
aagtgcaggagcaccactc

SEQ ID NO: 4518 - DNA, 19 bp, Homo sapiens
gagtggtgctcctgcactt

SEQ ID NO: 4519 - DNA, 19 bp, Homo sapiens
agtgcaggagcaccactcg

SEQ ID NO: 4520 - DNA, 19 bp, Homo sapiens
cgagtggtgctcctgcact

SEQ ID NO: 4521 - DNA, 19 bp, Homo sapiens
gtgcaggagcaccactcgc

SEQ ID NO: 4522 - DNA, 19 bp, Homo sapiens
gcgagtggtgctcctgcac

SEQ ID NO: 4523 - DNA, 19 bp, Homo sapiens
tgcaggagcaccactcgcc

SEQ ID NO: 4524 - DNA, 19 bp, Homo sapiens
ggcgagtggtgctcctgca

SEQ ID NO: 4525 - DNA, 19 bp, Homo sapiens
gcaggagcaccactcgcca

SEQ ID NO: 4526 - DNA, 19 bp, Homo sapiens
tggcgagtggtgctcctgc

SEQ ID NO: 4527 - DNA, 19 bp, Homo sapiens
caggagcaccactcgccat

SEQ ID NO: 4528 - DNA, 19 bp, Homo sapiens
atggcgagtggtgctcctg

SEQ ID NO: 4529 - DNA, 19 bp, Homo sapiens
aggagcaccactcgccatg

SEQ ID NO: 4530 - DNA, 19 bp, Homo sapiens
catggcgagtggtgctcct

SEQ ID NO: 4531 - DNA, 19 bp, Homo sapiens
ggagcaccactcgccatgt

SEQ ID NO: 4532 - DNA, 19 bp, Homo sapiens
acatggcgagtggtgctcc

SEQ ID NO: 4533 - DNA, 19 bp, Homo sapiens
gagcaccactcgccatgtc

SEQ ID NO: 4534 - DNA, 19 bp, Homo sapiens
gacatggcgagtggtgctc

SEQ ID NO: 4535 - DNA, 19 bp, Homo sapiens
agcaccactcgccatgtcc

SEQ ID NO: 4536 - DNA, 19 bp, Homo sapiens
ggacatggcgagtggtgct

SEQ ID NO: 4537 - DNA, 19 bp, Homo sapiens
gcaccactcgccatgtcct

SEQ ID NO: 4538 - DNA, 19 bp, Homo sapiens
aggacatggcgagtggtgc

SEQ ID NO: 4539 - DNA, 19 bp, Homo sapiens
caccactcgccatgtcctc

SEQ ID NO: 4540 - DNA, 19 bp, Homo sapiens
gaggacatggcgagtggtg

SEQ ID NO: 4541 - DNA, 19 bp, Homo sapiens
accactcgccatgtcctca

SEQ ID NO: 4542 - DNA, 19 bp, Homo sapiens
tgaggacatggcgagtggt

SEQ ID NO: 4543 - DNA, 19 bp, Homo sapiens
ccactcgccatgtcctcag

SEQ ID NO: 4544 - DNA, 19 bp, Homo sapiens
ctgaggacatggcgagtgg

SEQ ID NO: 4545 - DNA, 19 bp, Homo sapiens
cactcgccatgtcctcagg

SEQ ID NO: 4546 - DNA, 19 bp, Homo sapiens
cctgaggacatggcgagtg

SEQ ID NO: 4547 - DNA, 19 bp, Homo sapiens
actcgccatgtcctcaggc

SEQ ID NO: 4548 - DNA, 19 bp, Homo sapiens
gcctgaggacatggcgagt

SEQ ID NO: 4549 - DNA, 19 bp, Homo sapiens
ctcgccatgtcctcaggca

SEQ ID NO: 4550 - DNA, 19 bp, Homo sapiens
tgcctgaggacatggcgag

SEQ ID NO: 4551 - DNA, 19 bp, Homo sapiens
tcgccatgtcctcaggcac

SEQ ID NO: 4552 - DNA, 19 bp, Homo sapiens
gtgcctgaggacatggcga

SEQ ID NO: 4553 - DNA, 19 bp, Homo sapiens
cgccatgtcctcaggcaca

SEQ ID NO: 4554 - DNA, 19 bp, Homo sapiens
tgtgcctgaggacatggcg

SEQ ID NO: 4555 - DNA, 19 bp, Homo sapiens
gccatgtcctcaggcacaa

SEQ ID NO: 4556 - DNA, 19 bp, Homo sapiens
ttgtgcctgaggacatggc

SEQ ID NO: 4557 - DNA, 19 bp, Homo sapiens
ccatgtcctcaggcacaac

SEQ ID NO: 4558 - DNA, 19 bp, Homo sapiens
gttgtgcctgaggacatgg

SEQ ID NO: 4559 - DNA, 19 bp, Homo sapiens
catgtcctcaggcacaacc

SEQ ID NO: 4560 - DNA, 19 bp, Homo sapiens
ggttgtgcctgaggacatg

SEQ ID NO: 4561 - DNA, 19 bp, Homo sapiens
atgtcctcaggcacaaccc

SEQ ID NO: 4562 - DNA, 19 bp, Homo sapiens
gggttgtgcctgaggacat

SEQ ID NO: 4563 - DNA, 19 bp, Homo sapiens
tgtcctcaggcacaaccca

SEQ ID NO: 4564 - DNA, 19 bp, Homo sapiens
tgggttgtgcctgaggaca

SEQ ID NO: 4565 - DNA, 19 bp, Homo sapiens
gtcctcaggcacaacccaa

SEQ ID NO: 4566 - DNA, 19 bp, Homo sapiens
ttgggttgtgcctgaggac

SEQ ID NO: 4567 - DNA, 19 bp, Homo sapiens
tcctcaggcacaacccaac

SEQ ID NO: 4568 - DNA, 19 bp, Homo sapiens
gttgggttgtgcctgagga

SEQ ID NO: 4569 - DNA, 19 bp, Homo sapiens
cctcaggcacaacccaact

SEQ ID NO: 4570 - DNA, 19 bp, Homo sapiens
agttgggttgtgcctgagg

SEQ ID NO: 4571 - DNA, 19 bp, Homo sapiens
ctcaggcacaacccaactc

SEQ ID NO: 4572 - DNA, 19 bp, Homo sapiens
gagttgggttgtgcctgag

SEQ ID NO: 4573 - DNA, 19 bp, Homo sapiens
tcaggcacaacccaactca

SEQ ID NO: 4574 - DNA, 19 bp, Homo sapiens
tgagttgggttgtgcctga

SEQ ID NO: 4575 - DNA, 19 bp, Homo sapiens
caggcacaacccaactcag

SEQ ID NO: 4576 - DNA, 19 bp, Homo sapiens
ctgagttgggttgtgcctg

SEQ ID NO: 4577 - DNA, 19 bp, Homo sapiens
aggcacaacccaactcagg

SEQ ID NO: 4578 - DNA, 19 bp, Homo sapiens
cctgagttgggttgtgcct

SEQ ID NO: 4579 - DNA, 19 bp, Homo sapiens
ggcacaacccaactcaggg

SEQ ID NO: 4580 - DNA, 19 bp, Homo sapiens
ccctgagttgggttgtgcc

SEQ ID NO: 4581 - DNA, 19 bp, Homo sapiens
gcacaacccaactcagggc

SEQ ID NO: 4582 - DNA, 19 bp, Homo sapiens
gccctgagttgggttgtgc

SEQ ID NO: 4583 - DNA, 19 bp, Homo sapiens
cacaacccaactcagggcc

SEQ ID NO: 4584 - DNA, 19 bp, Homo sapiens
ggccctgagttgggttgtg

SEQ ID NO: 4585 - DNA, 19 bp, Homo sapiens
acaacccaactcagggcca

SEQ ID NO: 4586 - DNA, 19 bp, Homo sapiens
tggccctgagttgggttgt

SEQ ID NO: 4587 - DNA, 19 bp, Homo sapiens
caacccaactcagggccac

SEQ ID NO: 4588 - DNA, 19 bp, Homo sapiens
gtggccctgagttgggttg

SEQ ID NO: 4589 - DNA, 19 bp, Homo sapiens
aacccaactcagggccaca

SEQ ID NO: 4590 - DNA, 19 bp, Homo sapiens
tgtggccctgagttgggtt

SEQ ID NO: 4591 - DNA, 19 bp, Homo sapiens
acccaactcagggccacag

SEQ ID NO: 4592 - DNA, 19 bp, Homo sapiens
ctgtggccctgagttgggt

SEQ ID NO: 4593 - DNA, 19 bp, Homo sapiens
cccaactcagggccacagc

SEQ ID NO: 4594 - DNA, 19 bp, Homo sapiens
gctgtggccctgagttggg

SEQ ID NO: 4595 - DNA, 19 bp, Homo sapiens
ccaactcagggccacagcc

SEQ ID NO: 4596 - DNA, 19 bp, Homo sapiens
ggctgtggccctgagttgg

SEQ ID NO: 4597 - DNA, 19 bp, Homo sapiens
caactcagggccacagcca

SEQ ID NO: 4598 - DNA, 19 bp, Homo sapiens
tggctgtggccctgagttg

SEQ ID NO: 4599 - DNA, 19 bp, Homo sapiens
aactcagggccacagccac

SEQ ID NO: 4600 - DNA, 19 bp, Homo sapiens
gtggctgtggccctgagtt

SEQ ID NO: 4601 - DNA, 19 bp, Homo sapiens
actcagggccacagccacc

SEQ ID NO: 4602 - DNA, 19 bp, Homo sapiens
ggtggctgtggccctgagt

SEQ ID NO: 4603 - DNA, 19 bp, Homo sapiens
ctcagggccacagccacca

SEQ ID NO: 4604 - DNA, 19 bp, Homo sapiens
tggtggctgtggccctgag

SEQ ID NO: 4605 - DNA, 19 bp, Homo sapiens
tcagggccacagccaccac

SEQ ID NO: 4606 - DNA, 19 bp, Homo sapiens
gtggtggctgtggccctga

SEQ ID NO: 4607 - DNA, 19 bp, Homo sapiens
cagggccacagccaccacc

SEQ ID NO: 4608 - DNA, 19 bp, Homo sapiens
ggtggtggctgtggccctg

SEQ ID NO: 4609 - DNA, 19 bp, Homo sapiens
agggccacagccaccaccc

SEQ ID NO: 4610 - DNA, 19 bp, Homo sapiens
gggtggtggctgtggccct

SEQ ID NO: 4611 - DNA, 19 bp, Homo sapiens
gggccacagccaccaccct

SEQ ID NO: 4612 - DNA, 19 bp, Homo sapiens
agggtggtggctgtggccc

SEQ ID NO: 4613 - DNA, 19 bp, Homo sapiens
ggccacagccaccaccctc

SEQ ID NO: 4614 - DNA, 19 bp, Homo sapiens
gagggtggtggctgtggcc

SEQ ID NO: 4615 - DNA, 19 bp, Homo sapiens
gccacagccaccaccctca

SEQ ID NO: 4616 - DNA, 19 bp, Homo sapiens
tgagggtggtggctgtggc

SEQ ID NO: 4617 - DNA, 19 bp, Homo sapiens
ccacagccaccaccctcat

SEQ ID NO: 4618 - DNA, 19 bp, Homo sapiens
atgagggtggtggctgtgg

SEQ ID NO: 4619 - DNA, 19 bp, Homo sapiens
cacagccaccaccctcatc

SEQ ID NO: 4620 - DNA, 19 bp, Homo sapiens
gatgagggtggtggctgtg

SEQ ID NO: 4621 - DNA, 19 bp, Homo sapiens
acagccaccaccctcatcc

SEQ ID NO: 4622 - DNA, 19 bp, Homo sapiens
ggatgagggtggtggctgt

SEQ ID NO: 4623 - DNA, 19 bp, Homo sapiens
cagccaccaccctcatcct

SEQ ID NO: 4624 - DNA, 19 bp, Homo sapiens
aggatgagggtggtggctg

SEQ ID NO: 4625 - DNA, 19 bp, Homo sapiens
agccaccaccctcatcctt

SEQ ID NO: 4626 - DNA, 19 bp, Homo sapiens
aaggatgagggtggtggct

SEQ ID NO: 4627 - DNA, 19 bp, Homo sapiens
gccaccaccctcatccttt

SEQ ID NO: 4628 - DNA, 19 bp, Homo sapiens
aaaggatgagggtggtggc

SEQ ID NO: 4629 - DNA, 19 bp, Homo sapiens
ccaccaccctcatcctttg

SEQ ID NO: 4630 - DNA, 19 bp, Homo sapiens
caaaggatgagggtggtgg

SEQ ID NO: 4631 - DNA, 19 bp, Homo sapiens
caccaccctcatcctttgc

SEQ ID NO: 4632 - DNA, 19 bp, Homo sapiens
gcaaaggatgagggtggtg

SEQ ID NO: 4633 - DNA, 19 bp, Homo sapiens
accaccctcatcctttgct

SEQ ID NO: 4634 - DNA, 19 bp, Homo sapiens
agcaaaggatgagggtggt

SEQ ID NO: 4635 - DNA, 19 bp, Homo sapiens
ccaccctcatcctttgctg

SEQ ID NO: 4636 - DNA, 19 bp, Homo sapiens
cagcaaaggatgagggtgg

SEQ ID NO: 4637 - DNA, 19 bp, Homo sapiens
caccctcatcctttgctgc

SEQ ID NO: 4638 - DNA, 19 bp, Homo sapiens
gcagcaaaggatgagggtg

SEQ ID NO: 4639 - DNA, 19 bp, Homo sapiens
accctcatcctttgctgcc

SEQ ID NO: 4640 - DNA, 19 bp, Homo sapiens
ggcagcaaaggatgagggt

SEQ ID NO: 4641 - DNA, 19 bp, Homo sapiens
ccctcatcctttgctgcct

SEQ ID NO: 4642 - DNA, 19 bp, Homo sapiens
aggcagcaaaggatgaggg

SEQ ID NO: 4643 - DNA, 19 bp, Homo sapiens
cctcatcctttgctgcctc

SEQ ID NO: 4644 - DNA, 19 bp, Homo sapiens
gaggcagcaaaggatgagg

SEQ ID NO: 4645 - DNA, 19 bp, Homo sapiens
ctcatcctttgctgcctcc

SEQ ID NO: 4646 - DNA, 19 bp, Homo sapiens
ggaggcagcaaaggatgag

SEQ ID NO: 4647 - DNA, 19 bp, Homo sapiens
tcatcctttgctgcctcct

SEQ ID NO: 4648 - DNA, 19 bp, Homo sapiens
aggaggcagcaaaggatga

SEQ ID NO: 4649 - DNA, 19 bp, Homo sapiens
catcctttgctgcctcctc

SEQ ID NO: 4650 - DNA, 19 bp, Homo sapiens
gaggaggcagcaaaggatg

SEQ ID NO: 4651 - DNA, 19 bp, Homo sapiens
atcctttgctgcctcctca

SEQ ID NO: 4652 - DNA, 19 bp, Homo sapiens
tgaggaggcagcaaaggat

SEQ ID NO: 4653 - DNA, 19 bp, Homo sapiens
tcctttgctgcctcctcat

SEQ ID NO: 4654 - DNA, 19 bp, Homo sapiens
atgaggaggcagcaaagga

SEQ ID NO: 4655 - DNA, 19 bp, Homo sapiens
cctttgctgcctcctcatc

SEQ ID NO: 4656 - DNA, 19 bp, Homo sapiens
gatgaggaggcagcaaagg

SEQ ID NO: 4657 - DNA, 19 bp, Homo sapiens
ctttgctgcctcctcatca

SEQ ID NO: 4658 - DNA, 19 bp, Homo sapiens
tgatgaggaggcagcaaag

SEQ ID NO: 4659 - DNA, 19 bp, Homo sapiens
tttgctgcctcctcatcat

SEQ ID NO: 4660 - DNA, 19 bp, Homo sapiens
atgatgaggaggcagcaaa

SEQ ID NO: 4661 - DNA, 19 bp, Homo sapiens
ttgctgcctcctcatcatc

SEQ ID NO: 4662 - DNA, 19 bp, Homo sapiens
gatgatgaggaggcagcaa

SEQ ID NO: 4663 - DNA, 19 bp, Homo sapiens
tgctgcctcctcatcatcc

SEQ ID NO: 4664 - DNA, 19 bp, Homo sapiens
ggatgatgaggaggcagca

SEQ ID NO: 4665 - DNA, 19 bp, Homo sapiens
gctgcctcctcatcatcct

SEQ ID NO: 4666 - DNA, 19 bp, Homo sapiens
aggatgatgaggaggcagc

SEQ ID NO: 4667 - DNA, 19 bp, Homo sapiens
ctgcctcctcatcatcctc

SEQ ID NO: 4668 - DNA, 19 bp, Homo sapiens
gaggatgatgaggaggcag

SEQ ID NO: 4669 - DNA, 19 bp, Homo sapiens
tgcctcctcatcatcctcc

SEQ ID NO: 4670 - DNA, 19 bp, Homo sapiens
ggaggatgatgaggaggca

SEQ ID NO: 4671 - DNA, 19 bp, Homo sapiens
gcctcctcatcatcctccc

SEQ ID NO: 4672 - DNA, 19 bp, Homo sapiens
gggaggatgatgaggaggc

SEQ ID NO: 4673 - DNA, 19 bp, Homo sapiens
cctcctcatcatcctcccc

SEQ ID NO: 4674 - DNA, 19 bp, Homo sapiens
ggggaggatgatgaggagg

SEQ ID NO: 4675 - DNA, 19 bp, Homo sapiens
ctcctcatcatcctcccct

SEQ ID NO: 4676 - DNA, 19 bp, Homo sapiens
aggggaggatgatgaggag

SEQ ID NO: 4677 - DNA, 19 bp, Homo sapiens
tcctcatcatcctcccctg

SEQ ID NO: 4678 - DNA, 19 bp, Homo sapiens
caggggaggatgatgagga

SEQ ID NO: 4679 - DNA, 19 bp, Homo sapiens
cctcatcatcctcccctgc

SEQ ID NO: 4680 - DNA, 19 bp, Homo sapiens
gcaggggaggatgatgagg

SEQ ID NO: 4681 - DNA, 19 bp, Homo sapiens
ctcatcatcctcccctgct

SEQ ID NO: 4682 - DNA, 19 bp, Homo sapiens
agcaggggaggatgatgag

SEQ ID NO: 4683 - DNA, 19 bp, Homo sapiens
tcatcatcctcccctgctt

SEQ ID NO: 4684 - DNA, 19 bp, Homo sapiens
aagcaggggaggatgatga

SEQ ID NO: 4685 - DNA, 19 bp, Homo sapiens
catcatcctcccctgcttc

SEQ ID NO: 4686 - DNA, 19 bp, Homo sapiens
gaagcaggggaggatgatg

SEQ ID NO: 4687 - DNA, 19 bp, Homo sapiens
atcatcctcccctgcttca

SEQ ID NO: 4688 - DNA, 19 bp, Homo sapiens
tgaagcaggggaggatgat

SEQ ID NO: 4689 - DNA, 19 bp, Homo sapiens
tcatcctcccctgcttcat

SEQ ID NO: 4690 - DNA, 19 bp, Homo sapiens
atgaagcaggggaggatga

SEQ ID NO: 4691 - DNA, 19 bp, Homo sapiens
catcctcccctgcttcatc

SEQ ID NO: 4692 - DNA, 19 bp, Homo sapiens
gatgaagcaggggaggatg

SEQ ID NO: 4693 - DNA, 19 bp, Homo sapiens
atcctcccctgcttcatcc

SEQ ID NO: 4694 - DNA, 19 bp, Homo sapiens
ggatgaagcaggggaggat

SEQ ID NO: 4695 - DNA, 19 bp, Homo sapiens
tcctcccctgcttcatcct

SEQ ID NO: 4696 - DNA, 19 bp, Homo sapiens
aggatgaagcaggggagga

SEQ ID NO: 4697 - DNA, 19 bp, Homo sapiens
cctcccctgcttcatcctc

SEQ ID NO: 4698 - DNA, 19 bp, Homo sapiens
gaggatgaagcaggggagg

SEQ ID NO: 4699 - DNA, 19 bp, Homo sapiens
ctcccctgcttcatcctcc

SEQ ID NO: 4700 - DNA, 19 bp, Homo sapiens
ggaggatgaagcaggggag

SEQ ID NO: 4701 - DNA, 19 bp, Homo sapiens
tcccctgcttcatcctccc

SEQ ID NO: 4702 - DNA, 19 bp, Homo sapiens
gggaggatgaagcagggga

SEQ ID NO: 4703 - DNA, 19 bp, Homo sapiens
cccctgcttcatcctccct

SEQ ID NO: 4704 - DNA, 19 bp, Homo sapiens
agggaggatgaagcagggg

SEQ ID NO: 4705 - DNA, 19 bp, Homo sapiens
ccctgcttcatcctccctg

SEQ ID NO: 4706 - DNA, 19 bp, Homo sapiens
cagggaggatgaagcaggg

SEQ ID NO: 4707 - DNA, 19 bp, Homo sapiens
cctgcttcatcctccctgg

SEQ ID NO: 4708 - DNA, 19 bp, Homo sapiens
ccagggaggatgaagcagg

SEQ ID NO: 4709 - DNA, 19 bp, Homo sapiens
ctgcttcatcctccctggc

SEQ ID NO: 4710 - DNA, 19 bp, Homo sapiens
gccagggaggatgaagcag

SEQ ID NO: 4711 - DNA, 19 bp, Homo sapiens
tgcttcatcctccctggca

SEQ ID NO: 4712 - DNA, 19 bp, Homo sapiens
tgccagggaggatgaagca

SEQ ID NO: 4713 - DNA, 19 bp, Homo sapiens
gcttcatcctccctggcat

SEQ ID NO: 4714 - DNA, 19 bp, Homo sapiens
atgccagggaggatgaagc

SEQ ID NO: 4715 - DNA, 19 bp, Homo sapiens
cttcatcctccctggcatc

SEQ ID NO: 4716 - DNA, 19 bp, Homo sapiens
gatgccagggaggatgaag

SEQ ID NO: 4717 - DNA, 19 bp, Homo sapiens
ttcatcctccctggcatct

SEQ ID NO: 4718 - DNA, 19 bp, Homo sapiens
agatgccagggaggatgaa

SEQ ID NO: 4719 - DNA, 19 bp, Homo sapiens
tcatcctccctggcatctg

SEQ ID NO: 4720 - DNA, 19 bp, Homo sapiens
cagatgccagggaggatga

SEQ ID NO: 4721 - DNA, 19 bp, Homo sapiens
atggcagcggccgccagcc

SEQ ID NO: 4722 - DNA, 19 bp, Homo sapiens
ggctggcggccgctgccat

SEQ ID NO: 4723 - DNA, 19 bp, Homo sapiens
tggcagcggccgccagccc

SEQ ID NO: 4724 - DNA, 19 bp, Homo sapiens
gggctggcggccgctgcca

SEQ ID NO: 4725 - DNA, 19 bp, Homo sapiens
ggcagcggccgccagcccc

SEQ ID NO: 4726 - DNA, 19 bp, Homo sapiens
ggggctggcggccgctgcc

SEQ ID NO: 4727 - DNA, 19 bp, Homo sapiens
gcagcggccgccagccccg

SEQ ID NO: 4728 - DNA, 19 bp, Homo sapiens
cggggctggcggccgctgc

SEQ ID NO: 4729 - DNA, 19 bp, Homo sapiens
cagcggccgccagccccgc

SEQ ID NO: 4730 - DNA, 19 bp, Homo sapiens
gcggggctggcggccgctg

SEQ ID NO: 4731 - DNA, 19 bp, Homo sapiens
agcggccgccagccccgcg

SEQ ID NO: 4732 - DNA, 19 bp, Homo sapiens
cgcggggctggcggccgct

SEQ ID NO: 4733 - DNA, 19 bp, Homo sapiens
gcggccgccagccccgcga

SEQ ID NO: 4734 - DNA, 19 bp, Homo sapiens
tcgcggggctggcggccgc

SEQ ID NO: 4735 - DNA, 19 bp, Homo sapiens
cggccgccagccccgcgat

SEQ ID NO: 4736 - DNA, 19 bp, Homo sapiens
atcgcggggctggcggccg

SEQ ID NO: 4737 - DNA, 19 bp, Homo sapiens
ggccgccagccccgcgatc

SEQ ID NO: 4738 - DNA, 19 bp, Homo sapiens
gatcgcggggctggcggcc

SEQ ID NO: 4739 - DNA, 19 bp, Homo sapiens
gccgccagccccgcgatcc

SEQ ID NO: 4740 - DNA, 19 bp, Homo sapiens
ggatcgcggggctggcggc

SEQ ID NO: 4741 - DNA, 19 bp, Homo sapiens
ccgccagccccgcgatcct

SEQ ID NO: 4742 - DNA, 19 bp, Homo sapiens
aggatcgcggggctggcgg

SEQ ID NO: 4743 - DNA, 19 bp, Homo sapiens
cgccagccccgcgatcctt

SEQ ID NO: 4744 - DNA, 19 bp, Homo sapiens
aaggatcgcggggctggcg

SEQ ID NO: 4745 - DNA, 19 bp, Homo sapiens
gccagccccgcgatccttc

SEQ ID NO: 4746 - DNA, 19 bp, Homo sapiens
gaaggatcgcggggctggc

SEQ ID NO: 4747 - DNA, 19 bp, Homo sapiens
ccagccccgcgatccttcc

SEQ ID NO: 4748 - DNA, 19 bp, Homo sapiens
ggaaggatcgcggggctgg

SEQ ID NO: 4749 - DNA, 19 bp, Homo sapiens
cagccccgcgatccttccg

SEQ ID NO: 4750 - DNA, 19 bp, Homo sapiens
cggaaggatcgcggggctg

SEQ ID NO: 4751 - DNA, 19 bp, Homo sapiens
agccccgcgatccttccgc

SEQ ID NO: 4752 - DNA, 19 bp, Homo sapiens
gcggaaggatcgcggggct

SEQ ID NO: 4753 - DNA, 19 bp, Homo sapiens
gccccgcgatccttccgcg

SEQ ID NO: 4754 - DNA, 19 bp, Homo sapiens
cgcggaaggatcgcggggc

SEQ ID NO: 4755 - DNA, 19 bp, Homo sapiens
ccccgcgatccttccgcgc

SEQ ID NO: 4756 - DNA, 19 bp, Homo sapiens
gcgcggaaggatcgcgggg

SEQ ID NO: 4757 - DNA, 19 bp, Homo sapiens
cccgcgatccttccgcgcc

SEQ ID NO: 4758 - DNA, 19 bp, Homo sapiens
ggcgcggaaggatcgcggg

SEQ ID NO: 4759 - DNA, 19 bp, Homo sapiens
ccgcgatccttccgcgcct

SEQ ID NO: 4760 - DNA, 19 bp, Homo sapiens
aggcgcggaaggatcgcgg

SEQ ID NO: 4761 - DNA, 19 bp, Homo sapiens
cgcgatccttccgcgcctc

SEQ ID NO: 4762 - DNA, 19 bp, Homo sapiens
gaggcgcggaaggatcgcg

SEQ ID NO: 4763 - DNA, 19 bp, Homo sapiens
gcgatccttccgcgcctcg

SEQ ID NO: 4764 - DNA, 19 bp, Homo sapiens
cgaggcgcggaaggatcgc

SEQ ID NO: 4765 - DNA, 19 bp, Homo sapiens
cgatccttccgcgcctcgc

SEQ ID NO: 4766 - DNA, 19 bp, Homo sapiens
gcgaggcgcggaaggatcg

SEQ ID NO: 4767 - DNA, 19 bp, Homo sapiens
gatccttccgcgcctcgcg

SEQ ID NO: 4768 - DNA, 19 bp, Homo sapiens
cgcgaggcgcggaaggatc

SEQ ID NO: 4769 - DNA, 19 bp, Homo sapiens
atccttccgcgcctcgcga

SEQ ID NO: 4770 - DNA, 19 bp, Homo sapiens
tcgcgaggcgcggaaggat

SEQ ID NO: 4771 - DNA, 19 bp, Homo sapiens
tccttccgcgcctcgcgat

SEQ ID NO: 4772 - DNA, 19 bp, Homo sapiens
atcgcgaggcgcggaagga

SEQ ID NO: 4773 - DNA, 19 bp, Homo sapiens
ccttccgcgcctcgcgatt

SEQ ID NO: 4774 - DNA, 19 bp, Homo sapiens
aatcgcgaggcgcggaagg

SEQ ID NO: 4775 - DNA, 19 bp, Homo sapiens
cttccgcgcctcgcgattc

SEQ ID NO: 4776 - DNA, 19 bp, Homo sapiens
gaatcgcgaggcgcggaag

SEQ ID NO: 4777 - DNA, 19 bp, Homo sapiens
ttccgcgcctcgcgattct

SEQ ID NO: 4778 - DNA, 19 bp, Homo sapiens
agaatcgcgaggcgcggaa

SEQ ID NO: 4779 - DNA, 19 bp, Homo sapiens
tccgcgcctcgcgattctt

SEQ ID NO: 4780 - DNA, 19 bp, Homo sapiens
aagaatcgcgaggcgcgga

SEQ ID NO: 4781 - DNA, 19 bp, Homo sapiens
ccgcgcctcgcgattcttc

SEQ ID NO: 4782 - DNA, 19 bp, Homo sapiens
gaagaatcgcgaggcgcgg

SEQ ID NO: 4783 - DNA, 19 bp, Homo sapiens
cgcgcctcgcgattcttcc

SEQ ID NO: 4784 - DNA, 19 bp, Homo sapiens
ggaagaatcgcgaggcgcg

SEQ ID NO: 4785 - DNA, 19 bp, Homo sapiens
gcgcctcgcgattcttccg

SEQ ID NO: 4786 - DNA, 19 bp, Homo sapiens
cggaagaatcgcgaggcgc

SEQ ID NO: 4787 - DNA, 19 bp, Homo sapiens
cgcctcgcgattcttccgt

SEQ ID NO: 4788 - DNA, 19 bp, Homo sapiens
acggaagaatcgcgaggcg

SEQ ID NO: 4789 - DNA, 19 bp, Homo sapiens
gcctcgcgattcttccgta

SEQ ID NO: 4790 - DNA, 19 bp, Homo sapiens
tacggaagaatcgcgaggc

SEQ ID NO: 4791 - DNA, 19 bp, Homo sapiens
cctcgcgattcttccgtac

SEQ ID NO: 4792 - DNA, 19 bp, Homo sapiens
gtacggaagaatcgcgagg

SEQ ID NO: 4793 - DNA, 19 bp, Homo sapiens
ctcgcgattcttccgtacc

SEQ ID NO: 4794 - DNA, 19 bp, Homo sapiens
ggtacggaagaatcgcgag

SEQ ID NO: 4795 - DNA, 19 bp, Homo sapiens
tcgcgattcttccgtacct

SEQ ID NO: 4796 - DNA, 19 bp, Homo sapiens
aggtacggaagaatcgcga

SEQ ID NO: 4797 - DNA, 19 bp, Homo sapiens
cgcgattcttccgtacctg

SEQ ID NO: 4798 - DNA, 19 bp, Homo sapiens
caggtacggaagaatcgcg

SEQ ID NO: 4799 - DNA, 19 bp, Homo sapiens
gcgattcttccgtacctgc

SEQ ID NO: 4800 - DNA, 19 bp, Homo sapiens
gcaggtacggaagaatcgc

SEQ ID NO: 4801 - DNA, 19 bp, Homo sapiens
cgattcttccgtacctgct

SEQ ID NO: 4802 - DNA, 19 bp, Homo sapiens
agcaggtacggaagaatcg

SEQ ID NO: 4803 - DNA, 19 bp, Homo sapiens
gattcttccgtacctgcta

SEQ ID NO: 4804 - DNA, 19 bp, Homo sapiens
tagcaggtacggaagaatc

SEQ ID NO: 4805 - DNA, 19 bp, Homo sapiens
attcttccgtacctgctat

SEQ ID NO: 4806 - DNA, 19 bp, Homo sapiens
atagcaggtacggaagaat

SEQ ID NO: 4807 - DNA, 19 bp, Homo sapiens
ttcttccgtacctgctatt

SEQ ID NO: 4808 - DNA, 19 bp, Homo sapiens
aatagcaggtacggaagaa

SEQ ID NO: 4809 - DNA, 19 bp, Homo sapiens
tcttccgtacctgctattc

SEQ ID NO: 4810 - DNA, 19 bp, Homo sapiens
gaatagcaggtacggaaga

SEQ ID NO: 4811 - DNA, 19 bp, Homo sapiens
cttccgtacctgctattcg

SEQ ID NO: 4812 - DNA, 19 bp, Homo sapiens
cgaatagcaggtacggaag

SEQ ID NO: 4813 - DNA, 19 bp, Homo sapiens
ttccgtacctgctattcga

SEQ ID NO: 4814 - DNA, 19 bp, Homo sapiens
tcgaatagcaggtacggaa

SEQ ID NO: 4815 - DNA, 19 bp, Homo sapiens
tccgtacctgctattcgac

SEQ ID NO: 4816 - DNA, 19 bp, Homo sapiens
gtcgaatagcaggtacgga

SEQ ID NO: 4817 - DNA, 19 bp, Homo sapiens
ccgtacctgctattcgact

SEQ ID NO: 4818 - DNA, 19 bp, Homo sapiens
agtcgaatagcaggtacgg

SEQ ID NO: 4819 - DNA, 19 bp, Homo sapiens
cgtacctgctattcgactg

SEQ ID NO: 4820 - DNA, 19 bp, Homo sapiens
cagtcgaatagcaggtacg

SEQ ID NO: 4821 - DNA, 19 bp, Homo sapiens
gtacctgctattcgactgg

SEQ ID NO: 4822 - DNA, 19 bp, Homo sapiens
ccagtcgaatagcaggtac

SEQ ID NO: 4823 - DNA, 19 bp, Homo sapiens
tacctgctattcgactggt

SEQ ID NO: 4824 - DNA, 19 bp, Homo sapiens
accagtcgaatagcaggta

SEQ ID NO: 4825 - DNA, 19 bp, Homo sapiens
acctgctattcgactggtc

SEQ ID NO: 4826 - DNA, 19 bp, Homo sapiens
gaccagtcgaatagcaggt

SEQ ID NO: 4827 - DNA, 19 bp, Homo sapiens
cctgctattcgactggtcc

SEQ ID NO: 4828 - DNA, 19 bp, Homo sapiens
ggaccagtcgaatagcagg

SEQ ID NO: 4829 - DNA, 19 bp, Homo sapiens
ctgctattcgactggtccg

SEQ ID NO: 4830 - DNA, 19 bp, Homo sapiens
cggaccagtcgaatagcag

SEQ ID NO: 4831 - DNA, 19 bp, Homo sapiens
tgctattcgactggtccgg

SEQ ID NO: 4832 - DNA, 19 bp, Homo sapiens
ccggaccagtcgaatagca

SEQ ID NO: 4833 - DNA, 19 bp, Homo sapiens
gctattcgactggtccggg

SEQ ID NO: 4834 - DNA, 19 bp, Homo sapiens
cccggaccagtcgaatagc

SEQ ID NO: 4835 - DNA, 19 bp, Homo sapiens
ctattcgactggtccggga

SEQ ID NO: 4836 - DNA, 19 bp, Homo sapiens
tcccggaccagtcgaatag

SEQ ID NO: 4837 - DNA, 19 bp, Homo sapiens
tattcgactggtccgggac

SEQ ID NO: 4838 - DNA, 19 bp, Homo sapiens
gtcccggaccagtcgaata

SEQ ID NO: 4839 - DNA, 19 bp, Homo sapiens
attcgactggtccgggacg

SEQ ID NO: 4840 - DNA, 19 bp, Homo sapiens
cgtcccggaccagtcgaat

SEQ ID NO: 4841 - DNA, 19 bp, Homo sapiens
ttcgactggtccgggacgg

SEQ ID NO: 4842 - DNA, 19 bp, Homo sapiens
ccgtcccggaccagtcgaa

SEQ ID NO: 4843 - DNA, 19 bp, Homo sapiens
tcgactggtccgggacggg

SEQ ID NO: 4844 - DNA, 19 bp, Homo sapiens
cccgtcccggaccagtcga

SEQ ID NO: 4845 - DNA, 19 bp, Homo sapiens
cgactggtccgggacgggg

SEQ ID NO: 4846 - DNA, 19 bp, Homo sapiens
ccccgtcccggaccagtcg

SEQ ID NO: 4847 - DNA, 19 bp, Homo sapiens
gactggtccgggacggggc

SEQ ID NO: 4848 - DNA, 19 bp, Homo sapiens
gccccgtcccggaccagtc

SEQ ID NO: 4849 - DNA, 19 bp, Homo sapiens
actggtccgggacggggcg

SEQ ID NO: 4850 - DNA, 19 bp, Homo sapiens
cgccccgtcccggaccagt

SEQ ID NO: 4851 - DNA, 19 bp, Homo sapiens
ctggtccgggacggggcgg

SEQ ID NO: 4852 - DNA, 19 bp, Homo sapiens
ccgccccgtcccggaccag

SEQ ID NO: 4853 - DNA, 19 bp, Homo sapiens
tggtccgggacggggcggg

SEQ ID NO: 4854 - DNA, 19 bp, Homo sapiens
cccgccccgtcccggacca

SEQ ID NO: 4855 - DNA, 19 bp, Homo sapiens
ggtccgggacggggcgggc

SEQ ID NO: 4856 - DNA, 19 bp, Homo sapiens
gcccgccccgtcccggacc

SEQ ID NO: 4857 - DNA, 19 bp, Homo sapiens
gtccgggacggggcgggcc

SEQ ID NO: 4858 - DNA, 19 bp, Homo sapiens
ggcccgccccgtcccggac

SEQ ID NO: 4859 - DNA, 19 bp, Homo sapiens
tccgggacggggcgggccg

SEQ ID NO: 4860 - DNA, 19 bp, Homo sapiens
cggcccgccccgtcccgga

SEQ ID NO: 4861 - DNA, 19 bp, Homo sapiens
ccgggacggggcgggccga

SEQ ID NO: 4862 - DNA, 19 bp, Homo sapiens
tcggcccgccccgtcccgg

SEQ ID NO: 4863 - DNA, 19 bp, Homo sapiens
cgggacggggcgggccgac

SEQ ID NO: 4864 - DNA, 19 bp, Homo sapiens
gtcggcccgccccgtcccg

SEQ ID NO: 4865 - DNA, 19 bp, Homo sapiens
gggacggggcgggccgacg

SEQ ID NO: 4866 - DNA, 19 bp, Homo sapiens
cgtcggcccgccccgtccc

SEQ ID NO: 4867 - DNA, 19 bp, Homo sapiens
ggacggggcgggccgacgc

SEQ ID NO: 4868 - DNA, 19 bp, Homo sapiens
gcgtcggcccgccccgtcc

SEQ ID NO: 4869 - DNA, 19 bp, Homo sapiens
gacggggcgggccgacgct

SEQ ID NO: 4870 - DNA, 19 bp, Homo sapiens
agcgtcggcccgccccgtc

SEQ ID NO: 4871 - DNA, 19 bp, Homo sapiens
acggggcgggccgacgctc

SEQ ID NO: 4872 - DNA, 19 bp, Homo sapiens
gagcgtcggcccgccccgt

SEQ ID NO: 4873 - DNA, 19 bp, Homo sapiens
cggggcgggccgacgctca

SEQ ID NO: 4874 - DNA, 19 bp, Homo sapiens
tgagcgtcggcccgccccg

SEQ ID NO: 4875 - DNA, 19 bp, Homo sapiens
ggggcgggccgacgctcac

SEQ ID NO: 4876 - DNA, 19 bp, Homo sapiens
gtgagcgtcggcccgcccc

SEQ ID NO: 4877 - DNA, 19 bp, Homo sapiens
gggcgggccgacgctcact

SEQ ID NO: 4878 - DNA, 19 bp, Homo sapiens
agtgagcgtcggcccgccc

SEQ ID NO: 4879 - DNA, 19 bp, Homo sapiens
ggcgggccgacgctcactc

SEQ ID NO: 4880 - DNA, 19 bp, Homo sapiens
gagtgagcgtcggcccgcc

SEQ ID NO: 4881 - DNA, 19 bp, Homo sapiens
gcgggccgacgctcactct

SEQ ID NO: 4882 - DNA, 19 bp, Homo sapiens
agagtgagcgtcggcccgc

SEQ ID NO: 4883 - DNA, 19 bp, Homo sapiens
cgggccgacgctcactctc

SEQ ID NO: 4884 - DNA, 19 bp, Homo sapiens
gagagtgagcgtcggcccg

SEQ ID NO: 4885 - DNA, 19 bp, Homo sapiens
gggccgacgctcactctct

SEQ ID NO: 4886 - DNA, 19 bp, Homo sapiens
agagagtgagcgtcggccc

SEQ ID NO: 4887 - DNA, 19 bp, Homo sapiens
ggccgacgctcactctctc

SEQ ID NO: 4888 - DNA, 19 bp, Homo sapiens
gagagagtgagcgtcggcc

SEQ ID NO: 4889 - DNA, 19 bp, Homo sapiens
gccgacgctcactctctct

SEQ ID NO: 4890 - DNA, 19 bp, Homo sapiens
agagagagtgagcgtcggc

SEQ ID NO: 4891 - DNA, 19 bp, Homo sapiens
ccgacgctcactctctctg

SEQ ID NO: 4892 - DNA, 19 bp, Homo sapiens
cagagagagtgagcgtcgg

SEQ ID NO: 4893 - DNA, 19 bp, Homo sapiens
cgacgctcactctctctgg

SEQ ID NO: 4894 - DNA, 19 bp, Homo sapiens
ccagagagagtgagcgtcg

SEQ ID NO: 4895 - DNA, 19 bp, Homo sapiens
gacgctcactctctctggt

SEQ ID NO: 4896 - DNA, 19 bp, Homo sapiens
accagagagagtgagcgtc

SEQ ID NO: 4897 - DNA, 19 bp, Homo sapiens
acgctcactctctctggta

SEQ ID NO: 4898 - DNA, 19 bp, Homo sapiens
taccagagagagtgagcgt

SEQ ID NO: 4899 - DNA, 19 bp, Homo sapiens
cgctcactctctctggtat

SEQ ID NO: 4900 - DNA, 19 bp, Homo sapiens
ataccagagagagtgagcg

SEQ ID NO: 4901 - DNA, 19 bp, Homo sapiens
gctcactctctctggtata

SEQ ID NO: 4902 - DNA, 19 bp, Homo sapiens
tataccagagagagtgagc

SEQ ID NO: 4903 - DNA, 19 bp, Homo sapiens
ctcactctctctggtataa

SEQ ID NO: 4904 - DNA, 19 bp, Homo sapiens
ttataccagagagagtgag

SEQ ID NO: 4905 - DNA, 19 bp, Homo sapiens
tcactctctctggtataac

SEQ ID NO: 4906 - DNA, 19 bp, Homo sapiens
gttataccagagagagtga

SEQ ID NO: 4907 - DNA, 19 bp, Homo sapiens
cactctctctggtataact

SEQ ID NO: 4908 - DNA, 19 bp, Homo sapiens
agttataccagagagagtg

SEQ ID NO: 4909 - DNA, 19 bp, Homo sapiens
actctctctggtataactt

SEQ ID NO: 4910 - DNA, 19 bp, Homo sapiens
aagttataccagagagagt

SEQ ID NO: 4911 - DNA, 19 bp, Homo sapiens
ctctctctggtataacttc

SEQ ID NO: 4912 - DNA, 19 bp, Homo sapiens
gaagttataccagagagag

SEQ ID NO: 4913 - DNA, 19 bp, Homo sapiens
tctctctggtataacttca

SEQ ID NO: 4914 - DNA, 19 bp, Homo sapiens
tgaagttataccagagaga

SEQ ID NO: 4915 - DNA, 19 bp, Homo sapiens
ctctctggtataacttcac

SEQ ID NO: 4916 - DNA, 19 bp, Homo sapiens
gtgaagttataccagagag

SEQ ID NO: 4917 - DNA, 19 bp, Homo sapiens
tctctggtataacttcacc

SEQ ID NO: 4918 - DNA, 19 bp, Homo sapiens
ggtgaagttataccagaga

SEQ ID NO: 4919 - DNA, 19 bp, Homo sapiens
ctctggtataacttcacca

SEQ ID NO: 4920 - DNA, 19 bp, Homo sapiens
tggtgaagttataccagag

SEQ ID NO: 4921 - DNA, 19 bp, Homo sapiens
tctggtataacttcaccat

SEQ ID NO: 4922 - DNA, 19 bp, Homo sapiens
atggtgaagttataccaga

SEQ ID NO: 4923 - DNA, 19 bp, Homo sapiens
ctggtataacttcaccatc

SEQ ID NO: 4924 - DNA, 19 bp, Homo sapiens
gatggtgaagttataccag

SEQ ID NO: 4925 - DNA, 19 bp, Homo sapiens
tggtataacttcaccatca

SEQ ID NO: 4926 - DNA, 19 bp, Homo sapiens
tgatggtgaagttatacca

SEQ ID NO: 4927 - DNA, 19 bp, Homo sapiens
ggtataacttcaccatcat

SEQ ID NO: 4928 - DNA, 19 bp, Homo sapiens
atgatggtgaagttatacc

SEQ ID NO: 4929 - DNA, 19 bp, Homo sapiens
gtataacttcaccatcatt

SEQ ID NO: 4930 - DNA, 19 bp, Homo sapiens
aatgatggtgaagttatac

SEQ ID NO: 4931 - DNA, 19 bp, Homo sapiens
tataacttcaccatcattc

SEQ ID NO: 4932 - DNA, 19 bp, Homo sapiens
gaatgatggtgaagttata

SEQ ID NO: 4933 - DNA, 19 bp, Homo sapiens
ataacttcaccatcattca

SEQ ID NO: 4934 - DNA, 19 bp, Homo sapiens
tgaatgatggtgaagttat

SEQ ID NO: 4935 - DNA, 19 bp, Homo sapiens
taacttcaccatcattcat

SEQ ID NO: 4936 - DNA, 19 bp, Homo sapiens
atgaatgatggtgaagtta

SEQ ID NO: 4937 - DNA, 19 bp, Homo sapiens
aacttcaccatcattcatt

SEQ ID NO: 4938 - DNA, 19 bp, Homo sapiens
aatgaatgatggtgaagtt

SEQ ID NO: 4939 - DNA, 19 bp, Homo sapiens
acttcaccatcattcattt

SEQ ID NO: 4940 - DNA, 19 bp, Homo sapiens
aaatgaatgatggtgaagt

SEQ ID NO: 4941 - DNA, 19 bp, Homo sapiens
cttcaccatcattcatttg

SEQ ID NO: 4942 - DNA, 19 bp, Homo sapiens
caaatgaatgatggtgaag

SEQ ID NO: 4943 - DNA, 19 bp, Homo sapiens
ttcaccatcattcatttgc

SEQ ID NO: 4944 - DNA, 19 bp, Homo sapiens
gcaaatgaatgatggtgaa

SEQ ID NO: 4945 - DNA, 19 bp, Homo sapiens
tcaccatcattcatttgcc

SEQ ID NO: 4946 - DNA, 19 bp, Homo sapiens
ggcaaatgaatgatggtga

SEQ ID NO: 4947 - DNA, 19 bp, Homo sapiens
caccatcattcatttgccc

SEQ ID NO: 4948 - DNA, 19 bp, Homo sapiens
gggcaaatgaatgatggtg

SEQ ID NO: 4949 - DNA, 19 bp, Homo sapiens
accatcattcatttgccca

SEQ ID NO: 4950 - DNA, 19 bp, Homo sapiens
tgggcaaatgaatgatggt

SEQ ID NO: 4951 - DNA, 19 bp, Homo sapiens
ccatcattcatttgcccag

SEQ ID NO: 4952 - DNA, 19 bp, Homo sapiens
ctgggcaaatgaatgatgg

SEQ ID NO: 4953 - DNA, 19 bp, Homo sapiens
catcattcatttgcccaga

SEQ ID NO: 4954 - DNA, 19 bp, Homo sapiens
tctgggcaaatgaatgatg

SEQ ID NO: 4955 - DNA, 19 bp, Homo sapiens
atcattcatttgcccagac

SEQ ID NO: 4956 - DNA, 19 bp, Homo sapiens
gtctgggcaaatgaatgat

SEQ ID NO: 4957 - DNA, 19 bp, Homo sapiens
tcattcatttgcccagaca

SEQ ID NO: 4958 - DNA, 19 bp, Homo sapiens
tgtctgggcaaatgaatga

SEQ ID NO: 4959 - DNA, 19 bp, Homo sapiens
cattcatttgcccagacat

SEQ ID NO: 4960 - DNA, 19 bp, Homo sapiens
atgtctgggcaaatgaatg

SEQ ID NO: 4961 - DNA, 19 bp, Homo sapiens
attcatttgcccagacatg

SEQ ID NO: 4962 - DNA, 19 bp, Homo sapiens
catgtctgggcaaatgaat

SEQ ID NO: 4963 - DNA, 19 bp, Homo sapiens
ttcatttgcccagacatgg

SEQ ID NO: 4964 - DNA, 19 bp, Homo sapiens
ccatgtctgggcaaatgaa

SEQ ID NO: 4965 - DNA, 19 bp, Homo sapiens
tcatttgcccagacatggg

SEQ ID NO: 4966 - DNA, 19 bp, Homo sapiens
cccatgtctgggcaaatga

SEQ ID NO: 4967 - DNA, 19 bp, Homo sapiens
catttgcccagacatgggc

SEQ ID NO: 4968 - DNA, 19 bp, Homo sapiens
gcccatgtctgggcaaatg

SEQ ID NO: 4969 - DNA, 19 bp, Homo sapiens
atttgcccagacatgggca

SEQ ID NO: 4970 - DNA, 19 bp, Homo sapiens
tgcccatgtctgggcaaat

SEQ ID NO: 4971 - DNA, 19 bp, Homo sapiens
tttgcccagacatgggcaa

SEQ ID NO: 4972 - DNA, 19 bp, Homo sapiens
ttgcccatgtctgggcaaa

SEQ ID NO: 4973 - DNA, 19 bp, Homo sapiens
ttgcccagacatgggcaac

SEQ ID NO: 4974 - DNA, 19 bp, Homo sapiens
gttgcccatgtctgggcaa

SEQ ID NO: 4975 - DNA, 19 bp, Homo sapiens
tgcccagacatgggcaaca

SEQ ID NO: 4976 - DNA, 19 bp, Homo sapiens
tgttgcccatgtctgggca

SEQ ID NO: 4977 - DNA, 19 bp, Homo sapiens
gcccagacatgggcaacag

SEQ ID NO: 4978 - DNA, 19 bp, Homo sapiens
ctgttgcccatgtctgggc

SEQ ID NO: 4979 - DNA, 19 bp, Homo sapiens
cccagacatgggcaacagt

SEQ ID NO: 4980 - DNA, 19 bp, Homo sapiens
actgttgcccatgtctggg

SEQ ID NO: 4981 - DNA, 19 bp, Homo sapiens
ccagacatgggcaacagtg

SEQ ID NO: 4982 - DNA, 19 bp, Homo sapiens
cactgttgcccatgtctgg

SEQ ID NO: 4983 - DNA, 19 bp, Homo sapiens
cagacatgggcaacagtgg

SEQ ID NO: 4984 - DNA, 19 bp, Homo sapiens
ccactgttgcccatgtctg

SEQ ID NO: 4985 - DNA, 19 bp, Homo sapiens
agacatgggcaacagtggt

SEQ ID NO: 4986 - DNA, 19 bp, Homo sapiens
accactgttgcccatgtct

SEQ ID NO: 4987 - DNA, 19 bp, Homo sapiens
gacatgggcaacagtggtg

SEQ ID NO: 4988 - DNA, 19 bp, Homo sapiens
caccactgttgcccatgtc

SEQ ID NO: 4989 - DNA, 19 bp, Homo sapiens
acatgggcaacagtggtgt

SEQ ID NO: 4990 - DNA, 19 bp, Homo sapiens
acaccactgttgcccatgt

SEQ ID NO: 4991 - DNA, 19 bp, Homo sapiens
catgggcaacagtggtgtg

SEQ ID NO: 4992 - DNA, 19 bp, Homo sapiens
cacaccactgttgcccatg

SEQ ID NO: 4993 - DNA, 19 bp, Homo sapiens
atgggcaacagtggtgtga

SEQ ID NO: 4994 - DNA, 19 bp, Homo sapiens
tcacaccactgttgcccat

SEQ ID NO: 4995 - DNA, 19 bp, Homo sapiens
tgggcaacagtggtgtgag

SEQ ID NO: 4996 - DNA, 19 bp, Homo sapiens
ctcacaccactgttgccca

SEQ ID NO: 4997 - DNA, 19 bp, Homo sapiens
gggcaacagtggtgtgagg

SEQ ID NO: 4998 - DNA, 19 bp, Homo sapiens
cctcacaccactgttgccc

SEQ ID NO: 4999 - DNA, 19 bp, Homo sapiens
ggcaacagtggtgtgaggt

SEQ ID NO: 5000 - DNA, 19 bp, Homo sapiens
acctcacaccactgttgcc

SEQ ID NO: 5001 - DNA, 19 bp, Homo sapiens
gcaacagtggtgtgaggtc

SEQ ID NO: 5002 - DNA, 19 bp, Homo sapiens
gacctcacaccactgttgc

SEQ ID NO: 5003 - DNA, 19 bp, Homo sapiens
caacagtggtgtgaggtcc

SEQ ID NO: 5004 - DNA, 19 bp, Homo sapiens
ggacctcacaccactgttg

SEQ ID NO: 5005 - DNA, 19 bp, Homo sapiens
aacagtggtgtgaggtcca

SEQ ID NO: 5006 - DNA, 19 bp, Homo sapiens
tggacctcacaccactgtt

SEQ ID NO: 5007 - DNA, 19 bp, Homo sapiens
acagtggtgtgaggtccag

SEQ ID NO: 5008 - DNA, 19 bp, Homo sapiens
ctggacctcacaccactgt

SEQ ID NO: 5009 - DNA, 19 bp, Homo sapiens
cagtggtgtgaggtccaga

SEQ ID NO: 5010 - DNA, 19 bp, Homo sapiens
tctggacctcacaccactg

SEQ ID NO: 5011 - DNA, 19 bp, Homo sapiens
agtggtgtgaggtccagag

SEQ ID NO: 5012 - DNA, 19 bp, Homo sapiens
ctctggacctcacaccact

SEQ ID NO: 5013 - DNA, 19 bp, Homo sapiens
gtggtgtgaggtccagagc

SEQ ID NO: 5014 - DNA, 19 bp, Homo sapiens
gctctggacctcacaccac

SEQ ID NO: 5015 - DNA, 19 bp, Homo sapiens
tggtgtgaggtccagagcc

SEQ ID NO: 5016 - DNA, 19 bp, Homo sapiens
ggctctggacctcacacca

SEQ ID NO: 5017 - DNA, 19 bp, Homo sapiens
ggtgtgaggtccagagcca

SEQ ID NO: 5018 - DNA, 19 bp, Homo sapiens
tggctctggacctcacacc

SEQ ID NO: 5019 - DNA, 19 bp, Homo sapiens
gtgtgaggtccagagccag

SEQ ID NO: 5020 - DNA, 19 bp, Homo sapiens
ctggctctggacctcacac

SEQ ID NO: 5021 - DNA, 19 bp, Homo sapiens
tgtgaggtccagagccagg

SEQ ID NO: 5022 - DNA, 19 bp, Homo sapiens
cctggctctggacctcaca

SEQ ID NO: 5023 - DNA, 19 bp, Homo sapiens
gtgaggtccagagccaggt

SEQ ID NO: 5024 - DNA, 19 bp, Homo sapiens
acctggctctggacctcac

SEQ ID NO: 5025 - DNA, 19 bp, Homo sapiens
tgaggtccagagccaggtg

SEQ ID NO: 5026 - DNA, 19 bp, Homo sapiens
cacctggctctggacctca

SEQ ID NO: 5027 - DNA, 19 bp, Homo sapiens
gaggtccagagccaggtgg

SEQ ID NO: 5028 - DNA, 19 bp, Homo sapiens
ccacctggctctggacctc

SEQ ID NO: 5029 - DNA, 19 bp, Homo sapiens
aggtccagagccaggtgga

SEQ ID NO: 5030 - DNA, 19 bp, Homo sapiens
tccacctggctctggacct

SEQ ID NO: 5031 - DNA, 19 bp, Homo sapiens
ggtccagagccaggtggat

SEQ ID NO: 5032 - DNA, 19 bp, Homo sapiens
atccacctggctctggacc

SEQ ID NO: 5033 - DNA, 19 bp, Homo sapiens
gtccagagccaggtggatc

SEQ ID NO: 5034 - DNA, 19 bp, Homo sapiens
gatccacctggctctggac

SEQ ID NO: 5035 - DNA, 19 bp, Homo sapiens
tccagagccaggtggatca

SEQ ID NO: 5036 - DNA, 19 bp, Homo sapiens
tgatccacctggctctgga

SEQ ID NO: 5037 - DNA, 19 bp, Homo sapiens
ccagagccaggtggatcag

SEQ ID NO: 5038 - DNA, 19 bp, Homo sapiens
ctgatccacctggctctgg

SEQ ID NO: 5039 - DNA, 19 bp, Homo sapiens
cagagccaggtggatcaga

SEQ ID NO: 5040 - DNA, 19 bp, Homo sapiens
tctgatccacctggctctg

SEQ ID NO: 5041 - DNA, 19 bp, Homo sapiens
agagccaggtggatcagaa

SEQ ID NO: 5042 - DNA, 19 bp, Homo sapiens
ttctgatccacctggctct

SEQ ID NO: 5043 - DNA, 19 bp, Homo sapiens
gagccaggtggatcagaag

SEQ ID NO: 5044 - DNA, 19 bp, Homo sapiens
cttctgatccacctggctc

SEQ ID NO: 5045 - DNA, 19 bp, Homo sapiens
agccaggtggatcagaaga

SEQ ID NO: 5046 - DNA, 19 bp, Homo sapiens
tcttctgatccacctggct

SEQ ID NO: 5047 - DNA, 19 bp, Homo sapiens
gccaggtggatcagaagaa

SEQ ID NO: 5048 - DNA, 19 bp, Homo sapiens
ttcttctgatccacctggc

SEQ ID NO: 5049 - DNA, 19 bp, Homo sapiens
ccaggtggatcagaagaat

SEQ ID NO: 5050 - DNA, 19 bp, Homo sapiens
attcttctgatccacctgg

SEQ ID NO: 5051 - DNA, 19 bp, Homo sapiens
caggtggatcagaagaatt

SEQ ID NO: 5052 - DNA, 19 bp, Homo sapiens
aattcttctgatccacctg

SEQ ID NO: 5053 - DNA, 19 bp, Homo sapiens
aggtggatcagaagaattt

SEQ ID NO: 5054 - DNA, 19 bp, Homo sapiens
aaattcttctgatccacct

SEQ ID NO: 5055 - DNA, 19 bp, Homo sapiens
ggtggatcagaagaatttt

SEQ ID NO: 5056 - DNA, 19 bp, Homo sapiens
aaaattcttctgatccacc

SEQ ID NO: 5057 - DNA, 19 bp, Homo sapiens
gtggatcagaagaattttc

SEQ ID NO: 5058 - DNA, 19 bp, Homo sapiens
gaaaattcttctgatccac

SEQ ID NO: 5059 - DNA, 19 bp, Homo sapiens
tggatcagaagaattttct

SEQ ID NO: 5060 - DNA, 19 bp, Homo sapiens
agaaaattcttctgatcca

SEQ ID NO: 5061 - DNA, 19 bp, Homo sapiens
ggatcagaagaattttctc

SEQ ID NO: 5062 - DNA, 19 bp, Homo sapiens
gagaaaattcttctgatcc

SEQ ID NO: 5063 - DNA, 19 bp, Homo sapiens
gatcagaagaattttctct

SEQ ID NO: 5064 - DNA, 19 bp, Homo sapiens
agagaaaattcttctgatc

SEQ ID NO: 5065 - DNA, 19 bp, Homo sapiens
atcagaagaattttctctc

SEQ ID NO: 5066 - DNA, 19 bp, Homo sapiens
gagagaaaattcttctgat

SEQ ID NO: 5067 - DNA, 19 bp, Homo sapiens
tcagaagaattttctctcc

SEQ ID NO: 5068 - DNA, 19 bp, Homo sapiens
ggagagaaaattcttctga

SEQ ID NO: 5069 - DNA, 19 bp, Homo sapiens
cagaagaattttctctcct

SEQ ID NO: 5070 - DNA, 19 bp, Homo sapiens
aggagagaaaattcttctg

SEQ ID NO: 5071 - DNA, 19 bp, Homo sapiens
agaagaattttctctccta

SEQ ID NO: 5072 - DNA, 19 bp, Homo sapiens
taggagagaaaattcttct

SEQ ID NO: 5073 - DNA, 19 bp, Homo sapiens
gaagaattttctctcctat

SEQ ID NO: 5074 - DNA, 19 bp, Homo sapiens
ataggagagaaaattcttc

SEQ ID NO: 5075 - DNA, 19 bp, Homo sapiens
aagaattttctctcctatg

SEQ ID NO: 5076 - DNA, 19 bp, Homo sapiens
cataggagagaaaattctt

SEQ ID NO: 5077 - DNA, 19 bp, Homo sapiens
agaattttctctcctatga

SEQ ID NO: 5078 - DNA, 19 bp, Homo sapiens
tcataggagagaaaattct

SEQ ID NO: 5079 - DNA, 19 bp, Homo sapiens
gaattttctctcctatgac

SEQ ID NO: 5080 - DNA, 19 bp, Homo sapiens
gtcataggagagaaaattc

SEQ ID NO: 5081 - DNA, 19 bp, Homo sapiens
aattttctctcctatgact

SEQ ID NO: 5082 - DNA, 19 bp, Homo sapiens
agtcataggagagaaaatt

SEQ ID NO: 5083 - DNA, 19 bp, Homo sapiens
attttctctcctatgactg

SEQ ID NO: 5084 - DNA, 19 bp, Homo sapiens
cagtcataggagagaaaat

SEQ ID NO: 5085 - DNA, 19 bp, Homo sapiens
ttttctctcctatgactgt

SEQ ID NO: 5086 - DNA, 19 bp, Homo sapiens
acagtcataggagagaaaa

SEQ ID NO: 5087 - DNA, 19 bp, Homo sapiens
tttctctcctatgactgtg

SEQ ID NO: 5088 - DNA, 19 bp, Homo sapiens
cacagtcataggagagaaa

SEQ ID NO: 5089 - DNA, 19 bp, Homo sapiens
ttctctcctatgactgtgg

SEQ ID NO: 5090 - DNA, 19 bp, Homo sapiens
ccacagtcataggagagaa

SEQ ID NO: 5091 - DNA, 19 bp, Homo sapiens
tctctcctatgactgtggc

SEQ ID NO: 5092 - DNA, 19 bp, Homo sapiens
gccacagtcataggagaga

SEQ ID NO: 5093 - DNA, 19 bp, Homo sapiens
ctctcctatgactgtggca

SEQ ID NO: 5094 - DNA, 19 bp, Homo sapiens
tgccacagtcataggagag

SEQ ID NO: 5095 - DNA, 19 bp, Homo sapiens
tctcctatgactgtggcag

SEQ ID NO: 5096 - DNA, 19 bp, Homo sapiens
ctgccacagtcataggaga

SEQ ID NO: 5097 - DNA, 19 bp, Homo sapiens
ctcctatgactgtggcagt

SEQ ID NO: 5098 - DNA, 19 bp, Homo sapiens
actgccacagtcataggag

SEQ ID NO: 5099 - DNA, 19 bp, Homo sapiens
tcctatgactgtggcagtg

SEQ ID NO: 5100 - DNA, 19 bp, Homo sapiens
cactgccacagtcatagga

SEQ ID NO: 5101 - DNA, 19 bp, Homo sapiens
cctatgactgtggcagtga

SEQ ID NO: 5102 - DNA, 19 bp, Homo sapiens
tcactgccacagtcatagg

SEQ ID NO: 5103 - DNA, 19 bp, Homo sapiens
ctatgactgtggcagtgac

SEQ ID NO: 5104 - DNA, 19 bp, Homo sapiens
gtcactgccacagtcatag

SEQ ID NO: 5105 - DNA, 19 bp, Homo sapiens
tatgactgtggcagtgaca

SEQ ID NO: 5106 - DNA, 19 bp, Homo sapiens
tgtcactgccacagtcata

SEQ ID NO: 5107 - DNA, 19 bp, Homo sapiens
atgactgtggcagtgacaa

SEQ ID NO: 5108 - DNA, 19 bp, Homo sapiens
ttgtcactgccacagtcat

SEQ ID NO: 5109 - DNA, 19 bp, Homo sapiens
tgactgtggcagtgacaag

SEQ ID NO: 5110 - DNA, 19 bp, Homo sapiens
cttgtcactgccacagtca

SEQ ID NO: 5111 - DNA, 19 bp, Homo sapiens
gactgtggcagtgacaagg

SEQ ID NO: 5112 - DNA, 19 bp, Homo sapiens
ccttgtcactgccacagtc

SEQ ID NO: 5113 - DNA, 19 bp, Homo sapiens
actgtggcagtgacaaggt

SEQ ID NO: 5114 - DNA, 19 bp, Homo sapiens
accttgtcactgccacagt

SEQ ID NO: 5115 - DNA, 19 bp, Homo sapiens
ctgtggcagtgacaaggtc

SEQ ID NO: 5116 - DNA, 19 bp, Homo sapiens
gaccttgtcactgccacag

SEQ ID NO: 5117 - DNA, 19 bp, Homo sapiens
tgtggcagtgacaaggtct

SEQ ID NO: 5118 - DNA, 19 bp, Homo sapiens
agaccttgtcactgccaca

SEQ ID NO: 5119 - DNA, 19 bp, Homo sapiens
gtggcagtgacaaggtctt

SEQ ID NO: 5120 - DNA, 19 bp, Homo sapiens
aagaccttgtcactgccac

SEQ ID NO: 5121 - DNA, 19 bp, Homo sapiens
tggcagtgacaaggtctta

SEQ ID NO: 5122 - DNA, 19 bp, Homo sapiens
taagaccttgtcactgcca

SEQ ID NO: 5123 - DNA, 19 bp, Homo sapiens
ggcagtgacaaggtcttat

SEQ ID NO: 5124 - DNA, 19 bp, Homo sapiens
ataagaccttgtcactgcc

SEQ ID NO: 5125 - DNA, 19 bp, Homo sapiens
gcagtgacaaggtcttatc

SEQ ID NO: 5126 - DNA, 19 bp, Homo sapiens
gataagaccttgtcactgc

SEQ ID NO: 5127 - DNA, 19 bp, Homo sapiens
cagtgacaaggtcttatct

SEQ ID NO: 5128 - DNA, 19 bp, Homo sapiens
agataagaccttgtcactg

SEQ ID NO: 5129 - DNA, 19 bp, Homo sapiens
agtgacaaggtcttatcta

SEQ ID NO: 5130 - DNA, 19 bp, Homo sapiens
tagataagaccttgtcact

SEQ ID NO: 5131 - DNA, 19 bp, Homo sapiens
gtgacaaggtcttatctat

SEQ ID NO: 5132 - DNA, 19 bp, Homo sapiens
atagataagaccttgtcac

SEQ ID NO: 5133 - DNA, 19 bp, Homo sapiens
tgacaaggtcttatctatg

SEQ ID NO: 5134 - DNA, 19 bp, Homo sapiens
catagataagaccttgtca

SEQ ID NO: 5135 - DNA, 19 bp, Homo sapiens
gacaaggtcttatctatgg

SEQ ID NO: 5136 - DNA, 19 bp, Homo sapiens
ccatagataagaccttgtc

SEQ ID NO: 5137 - DNA, 19 bp, Homo sapiens
acaaggtcttatctatggg

SEQ ID NO: 5138 - DNA, 19 bp, Homo sapiens
cccatagataagaccttgt

SEQ ID NO: 5139 - DNA, 19 bp, Homo sapiens
caaggtcttatctatgggt

SEQ ID NO: 5140 - DNA, 19 bp, Homo sapiens
acccatagataagaccttg

SEQ ID NO: 5141 - DNA, 19 bp, Homo sapiens
aaggtcttatctatgggtc

SEQ ID NO: 5142 - DNA, 19 bp, Homo sapiens
gacccatagataagacctt

SEQ ID NO: 5143 - DNA, 19 bp, Homo sapiens
aggtcttatctatgggtca

SEQ ID NO: 5144 - DNA, 19 bp, Homo sapiens
tgacccatagataagacct

SEQ ID NO: 5145 - DNA, 19 bp, Homo sapiens
ggtcttatctatgggtcac

SEQ ID NO: 5146 - DNA, 19 bp, Homo sapiens
gtgacccatagataagacc

SEQ ID NO: 5147 - DNA, 19 bp, Homo sapiens
gtcttatctatgggtcacc

SEQ ID NO: 5148 - DNA, 19 bp, Homo sapiens
ggtgacccatagataagac

SEQ ID NO: 5149 - DNA, 19 bp, Homo sapiens
tcttatctatgggtcacct

SEQ ID NO: 5150 - DNA, 19 bp, Homo sapiens
aggtgacccatagataaga

SEQ ID NO: 5151 - DNA, 19 bp, Homo sapiens
cttatctatgggtcaccta

SEQ ID NO: 5152 - DNA, 19 bp, Homo sapiens
taggtgacccatagataag

SEQ ID NO: 5153 - DNA, 19 bp, Homo sapiens
ttatctatgggtcacctag

SEQ ID NO: 5154 - DNA, 19 bp, Homo sapiens
ctaggtgacccatagataa

SEQ ID NO: 5155 - DNA, 19 bp, Homo sapiens
tatctatgggtcacctaga

SEQ ID NO: 5156 - DNA, 19 bp, Homo sapiens
tctaggtgacccatagata

SEQ ID NO: 5157 - DNA, 19 bp, Homo sapiens
atctatgggtcacctagaa

SEQ ID NO: 5158 - DNA, 19 bp, Homo sapiens
ttctaggtgacccatagat

SEQ ID NO: 5159 - DNA, 19 bp, Homo sapiens
tctatgggtcacctagaag

SEQ ID NO: 5160 - DNA, 19 bp, Homo sapiens
cttctaggtgacccataga

SEQ ID NO: 5161 - DNA, 19 bp, Homo sapiens
ctatgggtcacctagaaga

SEQ ID NO: 5162 - DNA, 19 bp, Homo sapiens
tcttctaggtgacccatag

SEQ ID NO: 5163 - DNA, 19 bp, Homo sapiens
tatgggtcacctagaagag

SEQ ID NO: 5164 - DNA, 19 bp, Homo sapiens
ctcttctaggtgacccata

SEQ ID NO: 5165 - DNA, 19 bp, Homo sapiens
atgggtcacctagaagagc

SEQ ID NO: 5166 - DNA, 19 bp, Homo sapiens
gctcttctaggtgacccat

SEQ ID NO: 5167 - DNA, 19 bp, Homo sapiens
tgggtcacctagaagagca

SEQ ID NO: 5168 - DNA, 19 bp, Homo sapiens
tgctcttctaggtgaccca

SEQ ID NO: 5169 - DNA, 19 bp, Homo sapiens
gggtcacctagaagagcag

SEQ ID NO: 5170 - DNA, 19 bp, Homo sapiens
ctgctcttctaggtgaccc

SEQ ID NO: 5171 - DNA, 19 bp, Homo sapiens
ggtcacctagaagagcagc

SEQ ID NO: 5172 - DNA, 19 bp, Homo sapiens
gctgctcttctaggtgacc

SEQ ID NO: 5173 - DNA, 19 bp, Homo sapiens
gtcacctagaagagcagct

SEQ ID NO: 5174 - DNA, 19 bp, Homo sapiens
agctgctcttctaggtgac

SEQ ID NO: 5175 - DNA, 19 bp, Homo sapiens
tcacctagaagagcagctg

SEQ ID NO: 5176 - DNA, 19 bp, Homo sapiens
cagctgctcttctaggtga

SEQ ID NO: 5177 - DNA, 19 bp, Homo sapiens
cacctagaagagcagctgt

SEQ ID NO: 5178 - DNA, 19 bp, Homo sapiens
acagctgctcttctaggtg

SEQ ID NO: 5179 - DNA, 19 bp, Homo sapiens
acctagaagagcagctgta

SEQ ID NO: 5180 - DNA, 19 bp, Homo sapiens
tacagctgctcttctaggt

SEQ ID NO: 5181 - DNA, 19 bp, Homo sapiens
cctagaagagcagctgtat

SEQ ID NO: 5182 - DNA, 19 bp, Homo sapiens
atacagctgctcttctagg

SEQ ID NO: 5183 - DNA, 19 bp, Homo sapiens
ctagaagagcagctgtatg

SEQ ID NO: 5184 - DNA, 19 bp, Homo sapiens
catacagctgctcttctag

SEQ ID NO: 5185 - DNA, 19 bp, Homo sapiens
tagaagagcagctgtatgc

SEQ ID NO: 5186 - DNA, 19 bp, Homo sapiens
gcatacagctgctcttcta

SEQ ID NO: 5187 - DNA, 19 bp, Homo sapiens
agaagagcagctgtatgcc

SEQ ID NO: 5188 - DNA, 19 bp, Homo sapiens
ggcatacagctgctcttct

SEQ ID NO: 5189 - DNA, 19 bp, Homo sapiens
gaagagcagctgtatgcca

SEQ ID NO: 5190 - DNA, 19 bp, Homo sapiens
tggcatacagctgctcttc

SEQ ID NO: 5191 - DNA, 19 bp, Homo sapiens
aagagcagctgtatgccac

SEQ ID NO: 5192 - DNA, 19 bp, Homo sapiens
gtggcatacagctgctctt

SEQ ID NO: 5193 - DNA, 19 bp, Homo sapiens
agagcagctgtatgccaca

SEQ ID NO: 5194 - DNA, 19 bp, Homo sapiens
tgtggcatacagctgctct

SEQ ID NO: 5195 - DNA, 19 bp, Homo sapiens
gagcagctgtatgccacag

SEQ ID NO: 5196 - DNA, 19 bp, Homo sapiens
ctgtggcatacagctgctc

SEQ ID NO: 5197 - DNA, 19 bp, Homo sapiens
agcagctgtatgccacaga

SEQ ID NO: 5198 - DNA, 19 bp, Homo sapiens
tctgtggcatacagctgct

SEQ ID NO: 5199 - DNA, 19 bp, Homo sapiens
gcagctgtatgccacagat

SEQ ID NO: 5200 - DNA, 19 bp, Homo sapiens
atctgtggcatacagctgc

SEQ ID NO: 5201 - DNA, 19 bp, Homo sapiens
cagctgtatgccacagatg

SEQ ID NO: 5202 - DNA, 19 bp, Homo sapiens
catctgtggcatacagctg

SEQ ID NO: 5203 - DNA, 19 bp, Homo sapiens
agctgtatgccacagatgc

SEQ ID NO: 5204 - DNA, 19 bp, Homo sapiens
gcatctgtggcatacagct

SEQ ID NO: 5205 - DNA, 19 bp, Homo sapiens
gctgtatgccacagatgcc

SEQ ID NO: 5206 - DNA, 19 bp, Homo sapiens
ggcatctgtggcatacagc

SEQ ID NO: 5207 - DNA, 19 bp, Homo sapiens
ctgtatgccacagatgcct

SEQ ID NO: 5208 - DNA, 19 bp, Homo sapiens
aggcatctgtggcatacag

SEQ ID NO: 5209 - DNA, 19 bp, Homo sapiens
tgtatgccacagatgcctg

SEQ ID NO: 5210 - DNA, 19 bp, Homo sapiens
caggcatctgtggcataca

SEQ ID NO: 5211 - DNA, 19 bp, Homo sapiens
gtatgccacagatgcctgg

SEQ ID NO: 5212 - DNA, 19 bp, Homo sapiens
ccaggcatctgtggcatac

SEQ ID NO: 5213 - DNA, 19 bp, Homo sapiens
tatgccacagatgcctggg

SEQ ID NO: 5214 - DNA, 19 bp, Homo sapiens
cccaggcatctgtggcata

SEQ ID NO: 5215 - DNA, 19 bp, Homo sapiens
atgccacagatgcctgggg

SEQ ID NO: 5216 - DNA, 19 bp, Homo sapiens
ccccaggcatctgtggcat

SEQ ID NO: 5217 - DNA, 19 bp, Homo sapiens
tgccacagatgcctgggga

SEQ ID NO: 5218 - DNA, 19 bp, Homo sapiens
tccccaggcatctgtggca

SEQ ID NO: 5219 - DNA, 19 bp, Homo sapiens
gccacagatgcctggggaa

SEQ ID NO: 5220 - DNA, 19 bp, Homo sapiens
ttccccaggcatctgtggc

SEQ ID NO: 5221 - DNA, 19 bp, Homo sapiens
ccacagatgcctggggaaa

SEQ ID NO: 5222 - DNA, 19 bp, Homo sapiens
tttccccaggcatctgtgg

SEQ ID NO: 5223 - DNA, 19 bp, Homo sapiens
cacagatgcctggggaaaa

SEQ ID NO: 5224 - DNA, 19 bp, Homo sapiens
ttttccccaggcatctgtg

SEQ ID NO: 5225 - DNA, 19 bp, Homo sapiens
acagatgcctggggaaaac

SEQ ID NO: 5226 - DNA, 19 bp, Homo sapiens
gttttccccaggcatctgt

SEQ ID NO: 5227 - DNA, 19 bp, Homo sapiens
cagatgcctggggaaaaca

SEQ ID NO: 5228 - DNA, 19 bp, Homo sapiens
tgttttccccaggcatctg

SEQ ID NO: 5229 - DNA, 19 bp, Homo sapiens
agatgcctggggaaaacaa

SEQ ID NO: 5230 - DNA, 19 bp, Homo sapiens
ttgttttccccaggcatct

SEQ ID NO: 5231 - DNA, 19 bp, Homo sapiens
gatgcctggggaaaacaac

SEQ ID NO: 5232 - DNA, 19 bp, Homo sapiens
gttgttttccccaggcatc

SEQ ID NO: 5233 - DNA, 19 bp, Homo sapiens
atgcctggggaaaacaact

SEQ ID NO: 5234 - DNA, 19 bp, Homo sapiens
agttgttttccccaggcat

SEQ ID NO: 5235 - DNA, 19 bp, Homo sapiens
tgcctggggaaaacaactg

SEQ ID NO: 5236 - DNA, 19 bp, Homo sapiens
cagttgttttccccaggca

SEQ ID NO: 5237 - DNA, 19 bp, Homo sapiens
gcctggggaaaacaactgg

SEQ ID NO: 5238 - DNA, 19 bp, Homo sapiens
ccagttgttttccccaggc

SEQ ID NO: 5239 - DNA, 19 bp, Homo sapiens
cctggggaaaacaactgga

SEQ ID NO: 5240 - DNA, 19 bp, Homo sapiens
tccagttgttttccccagg

SEQ ID NO: 5241 - DNA, 19 bp, Homo sapiens
ctggggaaaacaactggaa

SEQ ID NO: 5242 - DNA, 19 bp, Homo sapiens
ttccagttgttttccccag

SEQ ID NO: 5243 - DNA, 19 bp, Homo sapiens
tggggaaaacaactggaaa

SEQ ID NO: 5244 - DNA, 19 bp, Homo sapiens
tttccagttgttttcccca

SEQ ID NO: 5245 - DNA, 19 bp, Homo sapiens
ggggaaaacaactggaaat

SEQ ID NO: 5246 - DNA, 19 bp, Homo sapiens
atttccagttgttttcccc

SEQ ID NO: 5247 - DNA, 19 bp, Homo sapiens
gggaaaacaactggaaatg

SEQ ID NO: 5248 - DNA, 19 bp, Homo sapiens
catttccagttgttttccc

SEQ ID NO: 5249 - DNA, 19 bp, Homo sapiens
ggaaaacaactggaaatgc

SEQ ID NO: 5250 - DNA, 19 bp, Homo sapiens
gcatttccagttgttttcc

SEQ ID NO: 5251 - DNA, 19 bp, Homo sapiens
gaaaacaactggaaatgct

SEQ ID NO: 5252 - DNA, 19 bp, Homo sapiens
agcatttccagttgttttc

SEQ ID NO: 5253 - DNA, 19 bp, Homo sapiens
aaaacaactggaaatgctg

SEQ ID NO: 5254 - DNA, 19 bp, Homo sapiens
cagcatttccagttgtttt

SEQ ID NO: 5255 - DNA, 19 bp, Homo sapiens
aaacaactggaaatgctga

SEQ ID NO: 5256 - DNA, 19 bp, Homo sapiens
tcagcatttccagttgttt

SEQ ID NO: 5257 - DNA, 19 bp, Homo sapiens
aacaactggaaatgctgag

SEQ ID NO: 5258 - DNA, 19 bp, Homo sapiens
ctcagcatttccagttgtt

SEQ ID NO: 5259 - DNA, 19 bp, Homo sapiens
acaactggaaatgctgaga

SEQ ID NO: 5260 - DNA, 19 bp, Homo sapiens
tctcagcatttccagttgt

SEQ ID NO: 5261 - DNA, 19 bp, Homo sapiens
caactggaaatgctgagag

SEQ ID NO: 5262 - DNA, 19 bp, Homo sapiens
ctctcagcatttccagttg

SEQ ID NO: 5263 - DNA, 19 bp, Homo sapiens
aactggaaatgctgagaga

SEQ ID NO: 5264 - DNA, 19 bp, Homo sapiens
tctctcagcatttccagtt

SEQ ID NO: 5265 - DNA, 19 bp, Homo sapiens
actggaaatgctgagagag

SEQ ID NO: 5266 - DNA, 19 bp, Homo sapiens
ctctctcagcatttccagt

SEQ ID NO: 5267 - DNA, 19 bp, Homo sapiens
ctggaaatgctgagagagg

SEQ ID NO: 5268 - DNA, 19 bp, Homo sapiens
cctctctcagcatttccag

SEQ ID NO: 5269 - DNA, 19 bp, Homo sapiens
tggaaatgctgagagaggt

SEQ ID NO: 5270 - DNA, 19 bp, Homo sapiens
acctctctcagcatttcca

SEQ ID NO: 5271 - DNA, 19 bp, Homo sapiens
ggaaatgctgagagaggtg

SEQ ID NO: 5272 - DNA, 19 bp, Homo sapiens
cacctctctcagcatttcc

SEQ ID NO: 5273 - DNA, 19 bp, Homo sapiens
gaaatgctgagagaggtgg

SEQ ID NO: 5274 - DNA, 19 bp, Homo sapiens
ccacctctctcagcatttc

SEQ ID NO: 5275 - DNA, 19 bp, Homo sapiens
aaatgctgagagaggtggg

SEQ ID NO: 5276 - DNA, 19 bp, Homo sapiens
cccacctctctcagcattt

SEQ ID NO: 5277 - DNA, 19 bp, Homo sapiens
aatgctgagagaggtgggg

SEQ ID NO: 5278 - DNA, 19 bp, Homo sapiens
ccccacctctctcagcatt

SEQ ID NO: 5279 - DNA, 19 bp, Homo sapiens
atgctgagagaggtggggc

SEQ ID NO: 5280 - DNA, 19 bp, Homo sapiens
gccccacctctctcagcat

SEQ ID NO: 5281 - DNA, 19 bp, Homo sapiens
tgctgagagaggtggggca

SEQ ID NO: 5282 - DNA, 19 bp, Homo sapiens
tgccccacctctctcagca

SEQ ID NO: 5283 - DNA, 19 bp, Homo sapiens
gctgagagaggtggggcag

SEQ ID NO: 5284 - DNA, 19 bp, Homo sapiens
ctgccccacctctctcagc

SEQ ID NO: 5285 - DNA, 19 bp, Homo sapiens
ctgagagaggtggggcaga

SEQ ID NO: 5286 - DNA, 19 bp, Homo sapiens
tctgccccacctctctcag

SEQ ID NO: 5287 - DNA, 19 bp, Homo sapiens
tgagagaggtggggcagag

SEQ ID NO: 5288 - DNA, 19 bp, Homo sapiens
ctctgccccacctctctca

SEQ ID NO: 5289 - DNA, 19 bp, Homo sapiens
gagagaggtggggcagagg

SEQ ID NO: 5290 - DNA, 19 bp, Homo sapiens
cctctgccccacctctctc

SEQ ID NO: 5291 - DNA, 19 bp, Homo sapiens
agagaggtggggcagaggc

SEQ ID NO: 5292 - DNA, 19 bp, Homo sapiens
gcctctgccccacctctct

SEQ ID NO: 5293 - DNA, 19 bp, Homo sapiens
gagaggtggggcagaggct

SEQ ID NO: 5294 - DNA, 19 bp, Homo sapiens
agcctctgccccacctctc

SEQ ID NO: 5295 - DNA, 19 bp, Homo sapiens
agaggtggggcagaggctc

SEQ ID NO: 5296 - DNA, 19 bp, Homo sapiens
gagcctctgccccacctct

SEQ ID NO: 5297 - DNA, 19 bp, Homo sapiens
gaggtggggcagaggctca

SEQ ID NO: 5298 - DNA, 19 bp, Homo sapiens
tgagcctctgccccacctc

SEQ ID NO: 5299 - DNA, 19 bp, Homo sapiens
aggtggggcagaggctcag

SEQ ID NO: 5300 - DNA, 19 bp, Homo sapiens
ctgagcctctgccccacct

SEQ ID NO: 5301 - DNA, 19 bp, Homo sapiens
ggtggggcagaggctcaga

SEQ ID NO: 5302 - DNA, 19 bp, Homo sapiens
tctgagcctctgccccacc

SEQ ID NO: 5303 - DNA, 19 bp, Homo sapiens
gtggggcagaggctcagac

SEQ ID NO: 5304 - DNA, 19 bp, Homo sapiens
gtctgagcctctgccccac

SEQ ID NO: 5305 - DNA, 19 bp, Homo sapiens
tggggcagaggctcagact

SEQ ID NO: 5306 - DNA, 19 bp, Homo sapiens
agtctgagcctctgcccca

SEQ ID NO: 5307 - DNA, 19 bp, Homo sapiens
ggggcagaggctcagactg

SEQ ID NO: 5308 - DNA, 19 bp, Homo sapiens
cagtctgagcctctgcccc

SEQ ID NO: 5309 - DNA, 19 bp, Homo sapiens
gggcagaggctcagactgg

SEQ ID NO: 5310 - DNA, 19 bp, Homo sapiens
ccagtctgagcctctgccc

SEQ ID NO: 5311 - DNA, 19 bp, Homo sapiens
ggcagaggctcagactgga

SEQ ID NO: 5312 - DNA, 19 bp, Homo sapiens
tccagtctgagcctctgcc

SEQ ID NO: 5313 - DNA, 19 bp, Homo sapiens
gcagaggctcagactggaa

SEQ ID NO: 5314 - DNA, 19 bp, Homo sapiens
ttccagtctgagcctctgc

SEQ ID NO: 5315 - DNA, 19 bp, Homo sapiens
cagaggctcagactggaac

SEQ ID NO: 5316 - DNA, 19 bp, Homo sapiens
gttccagtctgagcctctg

SEQ ID NO: 5317 - DNA, 19 bp, Homo sapiens
agaggctcagactggaact

SEQ ID NO: 5318 - DNA, 19 bp, Homo sapiens
agttccagtctgagcctct

SEQ ID NO: 5319 - DNA, 19 bp, Homo sapiens
gaggctcagactggaactg

SEQ ID NO: 5320 - DNA, 19 bp, Homo sapiens
cagttccagtctgagcctc

SEQ ID NO: 5321 - DNA, 19 bp, Homo sapiens
aggctcagactggaactgg

SEQ ID NO: 5322 - DNA, 19 bp, Homo sapiens
ccagttccagtctgagcct

SEQ ID NO: 5323 - DNA, 19 bp, Homo sapiens
ggctcagactggaactggc

SEQ ID NO: 5324 - DNA, 19 bp, Homo sapiens
gccagttccagtctgagcc

SEQ ID NO: 5325 - DNA, 19 bp, Homo sapiens
gctcagactggaactggct

SEQ ID NO: 5326 - DNA, 19 bp, Homo sapiens
agccagttccagtctgagc

SEQ ID NO: 5327 - DNA, 19 bp, Homo sapiens
ctcagactggaactggctg

SEQ ID NO: 5328 - DNA, 19 bp, Homo sapiens
cagccagttccagtctgag

SEQ ID NO: 5329 - DNA, 19 bp, Homo sapiens
tcagactggaactggctga

SEQ ID NO: 5330 - DNA, 19 bp, Homo sapiens
tcagccagttccagtctga

SEQ ID NO: 5331 - DNA, 19 bp, Homo sapiens
cagactggaactggctgac

SEQ ID NO: 5332 - DNA, 19 bp, Homo sapiens
gtcagccagttccagtctg

SEQ ID NO: 5333 - DNA, 19 bp, Homo sapiens
agactggaactggctgaca

SEQ ID NO: 5334 - DNA, 19 bp, Homo sapiens
tgtcagccagttccagtct

SEQ ID NO: 5335 - DNA, 19 bp, Homo sapiens
gactggaactggctgacac

SEQ ID NO: 5336 - DNA, 19 bp, Homo sapiens
gtgtcagccagttccagtc

SEQ ID NO: 5337 - DNA, 19 bp, Homo sapiens
actggaactggctgacact

SEQ ID NO: 5338 - DNA, 19 bp, Homo sapiens
agtgtcagccagttccagt

SEQ ID NO: 5339 - DNA, 19 bp, Homo sapiens
ctggaactggctgacactg

SEQ ID NO: 5340 - DNA, 19 bp, Homo sapiens
cagtgtcagccagttccag

SEQ ID NO: 5341 - DNA, 19 bp, Homo sapiens
tggaactggctgacactga

SEQ ID NO: 5342 - DNA, 19 bp, Homo sapiens
tcagtgtcagccagttcca

SEQ ID NO: 5343 - DNA, 19 bp, Homo sapiens
ggaactggctgacactgag

SEQ ID NO: 5344 - DNA, 19 bp, Homo sapiens
ctcagtgtcagccagttcc

SEQ ID NO: 5345 - DNA, 19 bp, Homo sapiens
gaactggctgacactgagc

SEQ ID NO: 5346 - DNA, 19 bp, Homo sapiens
gctcagtgtcagccagttc

SEQ ID NO: 5347 - DNA, 19 bp, Homo sapiens
aactggctgacactgagct

SEQ ID NO: 5348 - DNA, 19 bp, Homo sapiens
agctcagtgtcagccagtt

SEQ ID NO: 5349 - DNA, 19 bp, Homo sapiens
actggctgacactgagctg

SEQ ID NO: 5350 - DNA, 19 bp, Homo sapiens
cagctcagtgtcagccagt

SEQ ID NO: 5351 - DNA, 19 bp, Homo sapiens
ctggctgacactgagctgg

SEQ ID NO: 5352 - DNA, 19 bp, Homo sapiens
ccagctcagtgtcagccag

SEQ ID NO: 5353 - DNA, 19 bp, Homo sapiens
tggctgacactgagctgga

SEQ ID NO: 5354 - DNA, 19 bp, Homo sapiens
tccagctcagtgtcagcca

SEQ ID NO: 5355 - DNA, 19 bp, Homo sapiens
ggctgacactgagctggag

SEQ ID NO: 5356 - DNA, 19 bp, Homo sapiens
ctccagctcagtgtcagcc

SEQ ID NO: 5357 - DNA, 19 bp, Homo sapiens
gctgacactgagctggagg

SEQ ID NO: 5358 - DNA, 19 bp, Homo sapiens
cctccagctcagtgtcagc

SEQ ID NO: 5359 - DNA, 19 bp, Homo sapiens
ctgacactgagctggagga

SEQ ID NO: 5360 - DNA, 19 bp, Homo sapiens
tcctccagctcagtgtcag

SEQ ID NO: 5361 - DNA, 19 bp, Homo sapiens
tgacactgagctggaggat

SEQ ID NO: 5362 - DNA, 19 bp, Homo sapiens
atcctccagctcagtgtca

SEQ ID NO: 5363 - DNA, 19 bp, Homo sapiens
gacactgagctggaggatt

SEQ ID NO: 5364 - DNA, 19 bp, Homo sapiens
aatcctccagctcagtgtc

SEQ ID NO: 5365 - DNA, 19 bp, Homo sapiens
acactgagctggaggattt

SEQ ID NO: 5366 - DNA, 19 bp, Homo sapiens
aaatcctccagctcagtgt

SEQ ID NO: 5367 - DNA, 19 bp, Homo sapiens
cactgagctggaggatttc

SEQ ID NO: 5368 - DNA, 19 bp, Homo sapiens
gaaatcctccagctcagtg

SEQ ID NO: 5369 - DNA, 19 bp, Homo sapiens
actgagctggaggatttca

SEQ ID NO: 5370 - DNA, 19 bp, Homo sapiens
tgaaatcctccagctcagt

SEQ ID NO: 5371 - DNA, 19 bp, Homo sapiens
ctgagctggaggatttcac

SEQ ID NO: 5372 - DNA, 19 bp, Homo sapiens
gtgaaatcctccagctcag

SEQ ID NO: 5373 - DNA, 19 bp, Homo sapiens
tgagctggaggatttcaca

SEQ ID NO: 5374 - DNA, 19 bp, Homo sapiens
tgtgaaatcctccagctca

SEQ ID NO: 5375 - DNA, 19 bp, Homo sapiens
gagctggaggatttcacac

SEQ ID NO: 5376 - DNA, 19 bp, Homo sapiens
gtgtgaaatcctccagctc

SEQ ID NO: 5377 - DNA, 19 bp, Homo sapiens
agctggaggatttcacacc

SEQ ID NO: 5378 - DNA, 19 bp, Homo sapiens
ggtgtgaaatcctccagct

SEQ ID NO: 5379 - DNA, 19 bp, Homo sapiens
gctggaggatttcacaccc

SEQ ID NO: 5380 - DNA, 19 bp, Homo sapiens
gggtgtgaaatcctccagc

SEQ ID NO: 5381 - DNA, 19 bp, Homo sapiens
ctggaggatttcacaccca

SEQ ID NO: 5382 - DNA, 19 bp, Homo sapiens
tgggtgtgaaatcctccag

SEQ ID NO: 5383 - DNA, 19 bp, Homo sapiens
tggaggatttcacacccag

SEQ ID NO: 5384 - DNA, 19 bp, Homo sapiens
ctgggtgtgaaatcctcca

SEQ ID NO: 5385 - DNA, 19 bp, Homo sapiens
ggaggatttcacacccagt

SEQ ID NO: 5386 - DNA, 19 bp, Homo sapiens
actgggtgtgaaatcctcc

SEQ ID NO: 5387 - DNA, 19 bp, Homo sapiens
gaggatttcacacccagtg

SEQ ID NO: 5388 - DNA, 19 bp, Homo sapiens
cactgggtgtgaaatcctc

SEQ ID NO: 5389 - DNA, 19 bp, Homo sapiens
aggatttcacacccagtgg

SEQ ID NO: 5390 - DNA, 19 bp, Homo sapiens
ccactgggtgtgaaatcct

SEQ ID NO: 5391 - DNA, 19 bp, Homo sapiens
ggatttcacacccagtgga

SEQ ID NO: 5392 - DNA, 19 bp, Homo sapiens
tccactgggtgtgaaatcc

SEQ ID NO: 5393 - DNA, 19 bp, Homo sapiens
gatttcacacccagtggac

SEQ ID NO: 5394 - DNA, 19 bp, Homo sapiens
gtccactgggtgtgaaatc

SEQ ID NO: 5395 - DNA, 19 bp, Homo sapiens
atttcacacccagtggacc

SEQ ID NO: 5396 - DNA, 19 bp, Homo sapiens
ggtccactgggtgtgaaat

SEQ ID NO: 5397 - DNA, 19 bp, Homo sapiens
tttcacacccagtggaccc

SEQ ID NO: 5398 - DNA, 19 bp, Homo sapiens
gggtccactgggtgtgaaa

SEQ ID NO: 5399 - DNA, 19 bp, Homo sapiens
ttcacacccagtggacccc

SEQ ID NO: 5400 - DNA, 19 bp, Homo sapiens
ggggtccactgggtgtgaa

SEQ ID NO: 5401 - DNA, 19 bp, Homo sapiens
tcacacccagtggacccct

SEQ ID NO: 5402 - DNA, 19 bp, Homo sapiens
aggggtccactgggtgtga

SEQ ID NO: 5403 - DNA, 19 bp, Homo sapiens
cacacccagtggacccctc

SEQ ID NO: 5404 - DNA, 19 bp, Homo sapiens
gaggggtccactgggtgtg

SEQ ID NO: 5405 - DNA, 19 bp, Homo sapiens
acacccagtggacccctca

SEQ ID NO: 5406 - DNA, 19 bp, Homo sapiens
tgaggggtccactgggtgt

SEQ ID NO: 5407 - DNA, 19 bp, Homo sapiens
cacccagtggacccctcac

SEQ ID NO: 5408 - DNA, 19 bp, Homo sapiens
gtgaggggtccactgggtg

SEQ ID NO: 5409 - DNA, 19 bp, Homo sapiens
acccagtggacccctcacg

SEQ ID NO: 5410 - DNA, 19 bp, Homo sapiens
cgtgaggggtccactgggt

SEQ ID NO: 5411 - DNA, 19 bp, Homo sapiens
cccagtggacccctcacgc

SEQ ID NO: 5412 - DNA, 19 bp, Homo sapiens
gcgtgaggggtccactggg

SEQ ID NO: 5413 - DNA, 19 bp, Homo sapiens
ccagtggacccctcacgct

SEQ ID NO: 5414 - DNA, 19 bp, Homo sapiens
agcgtgaggggtccactgg

SEQ ID NO: 5415 - DNA, 19 bp, Homo sapiens
cagtggacccctcacgctg

SEQ ID NO: 5416 - DNA, 19 bp, Homo sapiens
cagcgtgaggggtccactg

SEQ ID NO: 5417 - DNA, 19 bp, Homo sapiens
agtggacccctcacgctgc

SEQ ID NO: 5418 - DNA, 19 bp, Homo sapiens
gcagcgtgaggggtccact

SEQ ID NO: 5419 - DNA, 19 bp, Homo sapiens
gtggacccctcacgctgca

SEQ ID NO: 5420 - DNA, 19 bp, Homo sapiens
tgcagcgtgaggggtccac

SEQ ID NO: 5421 - DNA, 19 bp, Homo sapiens
tggacccctcacgctgcag

SEQ ID NO: 5422 - DNA, 19 bp, Homo sapiens
ctgcagcgtgaggggtcca

SEQ ID NO: 5423 - DNA, 19 bp, Homo sapiens
ggacccctcacgctgcagg

SEQ ID NO: 5424 - DNA, 19 bp, Homo sapiens
cctgcagcgtgaggggtcc

SEQ ID NO: 5425 - DNA, 19 bp, Homo sapiens
gacccctcacgctgcaggt

SEQ ID NO: 5426 - DNA, 19 bp, Homo sapiens
acctgcagcgtgaggggtc

SEQ ID NO: 5427 - DNA, 19 bp, Homo sapiens
acccctcacgctgcaggtc

SEQ ID NO: 5428 - DNA, 19 bp, Homo sapiens
gacctgcagcgtgaggggt

SEQ ID NO: 5429 - DNA, 19 bp, Homo sapiens
cccctcacgctgcaggtca

SEQ ID NO: 5430 - DNA, 19 bp, Homo sapiens
tgacctgcagcgtgagggg

SEQ ID NO: 5431 - DNA, 19 bp, Homo sapiens
ccctcacgctgcaggtcag

SEQ ID NO: 5432 - DNA, 19 bp, Homo sapiens
ctgacctgcagcgtgaggg

SEQ ID NO: 5433 - DNA, 19 bp, Homo sapiens
cctcacgctgcaggtcagg

SEQ ID NO: 5434 - DNA, 19 bp, Homo sapiens
cctgacctgcagcgtgagg

SEQ ID NO: 5435 - DNA, 19 bp, Homo sapiens
ctcacgctgcaggtcagga

SEQ ID NO: 5436 - DNA, 19 bp, Homo sapiens
tcctgacctgcagcgtgag

SEQ ID NO: 5437 - DNA, 19 bp, Homo sapiens
tcacgctgcaggtcaggat

SEQ ID NO: 5438 - DNA, 19 bp, Homo sapiens
atcctgacctgcagcgtga

SEQ ID NO: 5439 - DNA, 19 bp, Homo sapiens
cacgctgcaggtcaggatg

SEQ ID NO: 5440 - DNA, 19 bp, Homo sapiens
catcctgacctgcagcgtg

SEQ ID NO: 5441 - DNA, 19 bp, Homo sapiens
acgctgcaggtcaggatgt

SEQ ID NO: 5442 - DNA, 19 bp, Homo sapiens
acatcctgacctgcagcgt

SEQ ID NO: 5443 - DNA, 19 bp, Homo sapiens
cgctgcaggtcaggatgtc

SEQ ID NO: 5444 - DNA, 19 bp, Homo sapiens
gacatcctgacctgcagcg

SEQ ID NO: 5445 - DNA, 19 bp, Homo sapiens
gctgcaggtcaggatgtct

SEQ ID NO: 5446 - DNA, 19 bp, Homo sapiens
agacatcctgacctgcagc

SEQ ID NO: 5447 - DNA, 19 bp, Homo sapiens
ctgcaggtcaggatgtctt

SEQ ID NO: 5448 - DNA, 19 bp, Homo sapiens
aagacatcctgacctgcag

SEQ ID NO: 5449 - DNA, 19 bp, Homo sapiens
tgcaggtcaggatgtcttg

SEQ ID NO: 5450 - DNA, 19 bp, Homo sapiens
caagacatcctgacctgca

SEQ ID NO: 5451 - DNA, 19 bp, Homo sapiens
gcaggtcaggatgtcttgt

SEQ ID NO: 5452 - DNA, 19 bp, Homo sapiens
acaagacatcctgacctgc

SEQ ID NO: 5453 - DNA, 19 bp, Homo sapiens
caggtcaggatgtcttgtg

SEQ ID NO: 5454 - DNA, 19 bp, Homo sapiens
cacaagacatcctgacctg

SEQ ID NO: 5455 - DNA, 19 bp, Homo sapiens
aggtcaggatgtcttgtga

SEQ ID NO: 5456 - DNA, 19 bp, Homo sapiens
tcacaagacatcctgacct

SEQ ID NO: 5457 - DNA, 19 bp, Homo sapiens
ggtcaggatgtcttgtgag

SEQ ID NO: 5458 - DNA, 19 bp, Homo sapiens
ctcacaagacatcctgacc

SEQ ID NO: 5459 - DNA, 19 bp, Homo sapiens
gtcaggatgtcttgtgagt

SEQ ID NO: 5460 - DNA, 19 bp, Homo sapiens
actcacaagacatcctgac

SEQ ID NO: 5461 - DNA, 19 bp, Homo sapiens
tcaggatgtcttgtgagtg

SEQ ID NO: 5462 - DNA, 19 bp, Homo sapiens
cactcacaagacatcctga

SEQ ID NO: 5463 - DNA, 19 bp, Homo sapiens
caggatgtcttgtgagtgt

SEQ ID NO: 5464 - DNA, 19 bp, Homo sapiens
acactcacaagacatcctg

SEQ ID NO: 5465 - DNA, 19 bp, Homo sapiens
aggatgtcttgtgagtgtg

SEQ ID NO: 5466 - DNA, 19 bp, Homo sapiens
cacactcacaagacatcct

SEQ ID NO: 5467 - DNA, 19 bp, Homo sapiens
ggatgtcttgtgagtgtga

SEQ ID NO: 5468 - DNA, 19 bp, Homo sapiens
tcacactcacaagacatcc

SEQ ID NO: 5469 - DNA, 19 bp, Homo sapiens
gatgtcttgtgagtgtgaa

SEQ ID NO: 5470 - DNA, 19 bp, Homo sapiens
ttcacactcacaagacatc

SEQ ID NO: 5471 - DNA, 19 bp, Homo sapiens
atgtcttgtgagtgtgaag

SEQ ID NO: 5472 - DNA, 19 bp, Homo sapiens
cttcacactcacaagacat

SEQ ID NO: 5473 - DNA, 19 bp, Homo sapiens
tgtcttgtgagtgtgaagc

SEQ ID NO: 5474 - DNA, 19 bp, Homo sapiens
gcttcacactcacaagaca

SEQ ID NO: 5475 - DNA, 19 bp, Homo sapiens
gtcttgtgagtgtgaagcc

SEQ ID NO: 5476 - DNA, 19 bp, Homo sapiens
ggcttcacactcacaagac

SEQ ID NO: 5477 - DNA, 19 bp, Homo sapiens
tcttgtgagtgtgaagccg

SEQ ID NO: 5478 - DNA, 19 bp, Homo sapiens
cggcttcacactcacaaga

SEQ ID NO: 5479 - DNA, 19 bp, Homo sapiens
cttgtgagtgtgaagccga

SEQ ID NO: 5480 - DNA, 19 bp, Homo sapiens
tcggcttcacactcacaag

SEQ ID NO: 5481 - DNA, 19 bp, Homo sapiens
ttgtgagtgtgaagccgat

SEQ ID NO: 5482 - DNA, 19 bp, Homo sapiens
atcggcttcacactcacaa

SEQ ID NO: 5483 - DNA, 19 bp, Homo sapiens
tgtgagtgtgaagccgatg

SEQ ID NO: 5484 - DNA, 19 bp, Homo sapiens
catcggcttcacactcaca

SEQ ID NO: 5485 - DNA, 19 bp, Homo sapiens
gtgagtgtgaagccgatgg

SEQ ID NO: 5486 - DNA, 19 bp, Homo sapiens
ccatcggcttcacactcac

SEQ ID NO: 5487 - DNA, 19 bp, Homo sapiens
tgagtgtgaagccgatgga

SEQ ID NO: 5488 - DNA, 19 bp, Homo sapiens
tccatcggcttcacactca

SEQ ID NO: 5489 - DNA, 19 bp, Homo sapiens
gagtgtgaagccgatggat

SEQ ID NO: 5490 - DNA, 19 bp, Homo sapiens
atccatcggcttcacactc

SEQ ID NO: 5491 - DNA, 19 bp, Homo sapiens
agtgtgaagccgatggata

SEQ ID NO: 5492 - DNA, 19 bp, Homo sapiens
tatccatcggcttcacact

SEQ ID NO: 5493 - DNA, 19 bp, Homo sapiens
gtgtgaagccgatggatac

SEQ ID NO: 5494 - DNA, 19 bp, Homo sapiens
gtatccatcggcttcacac

SEQ ID NO: 5495 - DNA, 19 bp, Homo sapiens
tgtgaagccgatggataca

SEQ ID NO: 5496 - DNA, 19 bp, Homo sapiens
tgtatccatcggcttcaca

SEQ ID NO: 5497 - DNA, 19 bp, Homo sapiens
gtgaagccgatggatacat

SEQ ID NO: 5498 - DNA, 19 bp, Homo sapiens
atgtatccatcggcttcac

SEQ ID NO: 5499 - DNA, 19 bp, Homo sapiens
tgaagccgatggatacatc

SEQ ID NO: 5500 - DNA, 19 bp, Homo sapiens
gatgtatccatcggcttca

SEQ ID NO: 5501 - DNA, 19 bp, Homo sapiens
gaagccgatggatacatcc

SEQ ID NO: 5502 - DNA, 19 bp, Homo sapiens
ggatgtatccatcggcttc

SEQ ID NO: 5503 - DNA, 19 bp, Homo sapiens
aagccgatggatacatccg

SEQ ID NO: 5504 - DNA, 19 bp, Homo sapiens
cggatgtatccatcggctt

SEQ ID NO: 5505 - DNA, 19 bp, Homo sapiens
agccgatggatacatccgt

SEQ ID NO: 5506 - DNA, 19 bp, Homo sapiens
acggatgtatccatcggct

SEQ ID NO: 5507 - DNA, 19 bp, Homo sapiens
gccgatggatacatccgtg

SEQ ID NO: 5508 - DNA, 19 bp, Homo sapiens
cacggatgtatccatcggc

SEQ ID NO: 5509 - DNA, 19 bp, Homo sapiens
ccgatggatacatccgtgg

SEQ ID NO: 5510 - DNA, 19 bp, Homo sapiens
ccacggatgtatccatcgg

SEQ ID NO: 5511 - DNA, 19 bp, Homo sapiens
cgatggatacatccgtgga

SEQ ID NO: 5512 - DNA, 19 bp, Homo sapiens
tccacggatgtatccatcg

SEQ ID NO: 5513 - DNA, 19 bp, Homo sapiens
gatggatacatccgtggat

SEQ ID NO: 5514 - DNA, 19 bp, Homo sapiens
atccacggatgtatccatc

SEQ ID NO: 5515 - DNA, 19 bp, Homo sapiens
atggatacatccgtggatc

SEQ ID NO: 5516 - DNA, 19 bp, Homo sapiens
gatccacggatgtatccat

SEQ ID NO: 5517 - DNA, 19 bp, Homo sapiens
tggatacatccgtggatct

SEQ ID NO: 5518 - DNA, 19 bp, Homo sapiens
agatccacggatgtatcca

SEQ ID NO: 5519 - DNA, 19 bp, Homo sapiens
ggatacatccgtggatctt

SEQ ID NO: 5520 - DNA, 19 bp, Homo sapiens
aagatccacggatgtatcc

SEQ ID NO: 5521 - DNA, 19 bp, Homo sapiens
gatacatccgtggatcttg

SEQ ID NO: 5522 - DNA, 19 bp, Homo sapiens
caagatccacggatgtatc

SEQ ID NO: 5523 - DNA, 19 bp, Homo sapiens
atacatccgtggatcttgg

SEQ ID NO: 5524 - DNA, 19 bp, Homo sapiens
ccaagatccacggatgtat

SEQ ID NO: 5525 - DNA, 19 bp, Homo sapiens
tacatccgtggatcttggc

SEQ ID NO: 5526 - DNA, 19 bp, Homo sapiens
gccaagatccacggatgta

SEQ ID NO: 5527 - DNA, 19 bp, Homo sapiens
acatccgtggatcttggca

SEQ ID NO: 5528 - DNA, 19 bp, Homo sapiens
tgccaagatccacggatgt

SEQ ID NO: 5529 - DNA, 19 bp, Homo sapiens
catccgtggatcttggcag

SEQ ID NO: 5530 - DNA, 19 bp, Homo sapiens
ctgccaagatccacggatg

SEQ ID NO: 5531 - DNA, 19 bp, Homo sapiens
atccgtggatcttggcagt

SEQ ID NO: 5532 - DNA, 19 bp, Homo sapiens
actgccaagatccacggat

SEQ ID NO: 5533 - DNA, 19 bp, Homo sapiens
tccgtggatcttggcagtt

SEQ ID NO: 5534 - DNA, 19 bp, Homo sapiens
aactgccaagatccacgga

SEQ ID NO: 5535 - DNA, 19 bp, Homo sapiens
ccgtggatcttggcagttc

SEQ ID NO: 5536 - DNA, 19 bp, Homo sapiens
gaactgccaagatccacgg

SEQ ID NO: 5537 - DNA, 19 bp, Homo sapiens
cgtggatcttggcagttca

SEQ ID NO: 5538 - DNA, 19 bp, Homo sapiens
tgaactgccaagatccacg

SEQ ID NO: 5539 - DNA, 19 bp, Homo sapiens
gtggatcttggcagttcag

SEQ ID NO: 5540 - DNA, 19 bp, Homo sapiens
ctgaactgccaagatccac

SEQ ID NO: 5541 - DNA, 19 bp, Homo sapiens
tggatcttggcagttcagc

SEQ ID NO: 5542 - DNA, 19 bp, Homo sapiens
gctgaactgccaagatcca

SEQ ID NO: 5543 - DNA, 19 bp, Homo sapiens
ggatcttggcagttcagct

SEQ ID NO: 5544 - DNA, 19 bp, Homo sapiens
agctgaactgccaagatcc

SEQ ID NO: 5545 - DNA, 19 bp, Homo sapiens
gatcttggcagttcagctt

SEQ ID NO: 5546 - DNA, 19 bp, Homo sapiens
aagctgaactgccaagatc

SEQ ID NO: 5547 - DNA, 19 bp, Homo sapiens
atcttggcagttcagcttc

SEQ ID NO: 5548 - DNA, 19 bp, Homo sapiens
gaagctgaactgccaagat

SEQ ID NO: 5549 - DNA, 19 bp, Homo sapiens
tcttggcagttcagcttcg

SEQ ID NO: 5550 - DNA, 19 bp, Homo sapiens
cgaagctgaactgccaaga

SEQ ID NO: 5551 - DNA, 19 bp, Homo sapiens
cttggcagttcagcttcga

SEQ ID NO: 5552 - DNA, 19 bp, Homo sapiens
tcgaagctgaactgccaag

SEQ ID NO: 5553 - DNA, 19 bp, Homo sapiens
ttggcagttcagcttcgat

SEQ ID NO: 5554 - DNA, 19 bp, Homo sapiens
atcgaagctgaactgccaa

SEQ ID NO: 5555 - DNA, 19 bp, Homo sapiens
tggcagttcagcttcgatg

SEQ ID NO: 5556 - DNA, 19 bp, Homo sapiens
catcgaagctgaactgcca

SEQ ID NO: 5557 - DNA, 19 bp, Homo sapiens
ggcagttcagcttcgatgg

SEQ ID NO: 5558 - DNA, 19 bp, Homo sapiens
ccatcgaagctgaactgcc

SEQ ID NO: 5559 - DNA, 19 bp, Homo sapiens
gcagttcagcttcgatgga

SEQ ID NO: 5560 - DNA, 19 bp, Homo sapiens
tccatcgaagctgaactgc

SEQ ID NO: 5561 - DNA, 19 bp, Homo sapiens
cagttcagcttcgatggac

SEQ ID NO: 5562 - DNA, 19 bp, Homo sapiens
gtccatcgaagctgaactg

SEQ ID NO: 5563 - DNA, 19 bp, Homo sapiens
agttcagcttcgatggacg

SEQ ID NO: 5564 - DNA, 19 bp, Homo sapiens
cgtccatcgaagctgaact

SEQ ID NO: 5565 - DNA, 19 bp, Homo sapiens
gttcagcttcgatggacgg

SEQ ID NO: 5566 - DNA, 19 bp, Homo sapiens
ccgtccatcgaagctgaac

SEQ ID NO: 5567 - DNA, 19 bp, Homo sapiens
ttcagcttcgatggacgga

SEQ ID NO: 5568 - DNA, 19 bp, Homo sapiens
tccgtccatcgaagctgaa

SEQ ID NO: 5569 - DNA, 19 bp, Homo sapiens
tcagcttcgatggacggaa

SEQ ID NO: 5570 - DNA, 19 bp, Homo sapiens
ttccgtccatcgaagctga

SEQ ID NO: 5571 - DNA, 19 bp, Homo sapiens
cagcttcgatggacggaag

SEQ ID NO: 5572 - DNA, 19 bp, Homo sapiens
cttccgtccatcgaagctg

SEQ ID NO: 5573 - DNA, 19 bp, Homo sapiens
agcttcgatggacggaagt

SEQ ID NO: 5574 - DNA, 19 bp, Homo sapiens
acttccgtccatcgaagct

SEQ ID NO: 5575 - DNA, 19 bp, Homo sapiens
gcttcgatggacggaagtt

SEQ ID NO: 5576 - DNA, 19 bp, Homo sapiens
aacttccgtccatcgaagc

SEQ ID NO: 5577 - DNA, 19 bp, Homo sapiens
cttcgatggacggaagttc

SEQ ID NO: 5578 - DNA, 19 bp, Homo sapiens
gaacttccgtccatcgaag

SEQ ID NO: 5579 - DNA, 19 bp, Homo sapiens
ttcgatggacggaagttcc

SEQ ID NO: 5580 - DNA, 19 bp, Homo sapiens
ggaacttccgtccatcgaa

SEQ ID NO: 5581 - DNA, 19 bp, Homo sapiens
tcgatggacggaagttcct

SEQ ID NO: 5582 - DNA, 19 bp, Homo sapiens
aggaacttccgtccatcga

SEQ ID NO: 5583 - DNA, 19 bp, Homo sapiens
cgatggacggaagttcctc

SEQ ID NO: 5584 - DNA, 19 bp, Homo sapiens
gaggaacttccgtccatcg

SEQ ID NO: 5585 - DNA, 19 bp, Homo sapiens
gatggacggaagttcctcc

SEQ ID NO: 5586 - DNA, 19 bp, Homo sapiens
ggaggaacttccgtccatc

SEQ ID NO: 5587 - DNA, 19 bp, Homo sapiens
atggacggaagttcctcct

SEQ ID NO: 5588 - DNA, 19 bp, Homo sapiens
aggaggaacttccgtccat

SEQ ID NO: 5589 - DNA, 19 bp, Homo sapiens
tggacggaagttcctcctc

SEQ ID NO: 5590 - DNA, 19 bp, Homo sapiens
gaggaggaacttccgtcca

SEQ ID NO: 5591 - DNA, 19 bp, Homo sapiens
ggacggaagttcctcctct

SEQ ID NO: 5592 - DNA, 19 bp, Homo sapiens
agaggaggaacttccgtcc

SEQ ID NO: 5593 - DNA, 19 bp, Homo sapiens
gacggaagttcctcctctt

SEQ ID NO: 5594 - DNA, 19 bp, Homo sapiens
aagaggaggaacttccgtc

SEQ ID NO: 5595 - DNA, 19 bp, Homo sapiens
acggaagttcctcctcttt

SEQ ID NO: 5596 - DNA, 19 bp, Homo sapiens
aaagaggaggaacttccgt

SEQ ID NO: 5597 - DNA, 19 bp, Homo sapiens
cggaagttcctcctctttg

SEQ ID NO: 5598 - DNA, 19 bp, Homo sapiens
caaagaggaggaacttccg

SEQ ID NO: 5599 - DNA, 19 bp, Homo sapiens
ggaagttcctcctctttga

SEQ ID NO: 5600 - DNA, 19 bp, Homo sapiens
tcaaagaggaggaacttcc

SEQ ID NO: 5601 - DNA, 19 bp, Homo sapiens
gaagttcctcctctttgac

SEQ ID NO: 5602 - DNA, 19 bp, Homo sapiens
gtcaaagaggaggaacttc

SEQ ID NO: 5603 - DNA, 19 bp, Homo sapiens
aagttcctcctctttgact

SEQ ID NO: 5604 - DNA, 19 bp, Homo sapiens
agtcaaagaggaggaactt

SEQ ID NO: 5605 - DNA, 19 bp, Homo sapiens
agttcctcctctttgactc

SEQ ID NO: 5606 - DNA, 19 bp, Homo sapiens
gagtcaaagaggaggaact

SEQ ID NO: 5607 - DNA, 19 bp, Homo sapiens
gttcctcctctttgactca

SEQ ID NO: 5608 - DNA, 19 bp, Homo sapiens
tgagtcaaagaggaggaac

SEQ ID NO: 5609 - DNA, 19 bp, Homo sapiens
ttcctcctctttgactcaa

SEQ ID NO: 5610 - DNA, 19 bp, Homo sapiens
ttgagtcaaagaggaggaa

SEQ ID NO: 5611 - DNA, 19 bp, Homo sapiens
tcctcctctttgactcaaa

SEQ ID NO: 5612 - DNA, 19 bp, Homo sapiens
tttgagtcaaagaggagga

SEQ ID NO: 5613 - DNA, 19 bp, Homo sapiens
cctcctctttgactcaaac

SEQ ID NO: 5614 - DNA, 19 bp, Homo sapiens
gtttgagtcaaagaggagg

SEQ ID NO: 5615 - DNA, 19 bp, Homo sapiens
ctcctctttgactcaaaca

SEQ ID NO: 5616 - DNA, 19 bp, Homo sapiens
tgtttgagtcaaagaggag

SEQ ID NO: 5617 - DNA, 19 bp, Homo sapiens
tcctctttgactcaaacaa

SEQ ID NO: 5618 - DNA, 19 bp, Homo sapiens
ttgtttgagtcaaagagga

SEQ ID NO: 5619 - DNA, 19 bp, Homo sapiens
cctctttgactcaaacaac

SEQ ID NO: 5620 - DNA, 19 bp, Homo sapiens
gttgtttgagtcaaagagg

SEQ ID NO: 5621 - DNA, 19 bp, Homo sapiens
ctctttgactcaaacaaca

SEQ ID NO: 5622 - DNA, 19 bp, Homo sapiens
tgttgtttgagtcaaagag

SEQ ID NO: 5623 - DNA, 19 bp, Homo sapiens
tctttgactcaaacaacag

SEQ ID NO: 5624 - DNA, 19 bp, Homo sapiens
ctgttgtttgagtcaaaga

SEQ ID NO: 5625 - DNA, 19 bp, Homo sapiens
ctttgactcaaacaacaga

SEQ ID NO: 5626 - DNA, 19 bp, Homo sapiens
tctgttgtttgagtcaaag

SEQ ID NO: 5627 - DNA, 19 bp, Homo sapiens
tttgactcaaacaacagaa

SEQ ID NO: 5628 - DNA, 19 bp, Homo sapiens
ttctgttgtttgagtcaaa

SEQ ID NO: 5629 - DNA, 19 bp, Homo sapiens
ttgactcaaacaacagaaa

SEQ ID NO: 5630 - DNA, 19 bp, Homo sapiens
tttctgttgtttgagtcaa

SEQ ID NO: 5631 - DNA, 19 bp, Homo sapiens
tgactcaaacaacagaaag

SEQ ID NO: 5632 - DNA, 19 bp, Homo sapiens
ctttctgttgtttgagtca

SEQ ID NO: 5633 - DNA, 19 bp, Homo sapiens
gactcaaacaacagaaagt

SEQ ID NO: 5634 - DNA, 19 bp, Homo sapiens
actttctgttgtttgagtc

SEQ ID NO: 5635 - DNA, 19 bp, Homo sapiens
actcaaacaacagaaagtg

SEQ ID NO: 5636 - DNA, 19 bp, Homo sapiens
cactttctgttgtttgagt

SEQ ID NO: 5637 - DNA, 19 bp, Homo sapiens
ctcaaacaacagaaagtgg

SEQ ID NO: 5638 - DNA, 19 bp, Homo sapiens
ccactttctgttgtttgag

SEQ ID NO: 5639 - DNA, 19 bp, Homo sapiens
tcaaacaacagaaagtgga

SEQ ID NO: 5640 - DNA, 19 bp, Homo sapiens
tccactttctgttgtttga

SEQ ID NO: 5641 - DNA, 19 bp, Homo sapiens
caaacaacagaaagtggac

SEQ ID NO: 5642 - DNA, 19 bp, Homo sapiens
gtccactttctgttgtttg

SEQ ID NO: 5643 - DNA, 19 bp, Homo sapiens
aaacaacagaaagtggaca

SEQ ID NO: 5644 - DNA, 19 bp, Homo sapiens
tgtccactttctgttgttt

SEQ ID NO: 5645 - DNA, 19 bp, Homo sapiens
aacaacagaaagtggacag

SEQ ID NO: 5646 - DNA, 19 bp, Homo sapiens
ctgtccactttctgttgtt

SEQ ID NO: 5647 - DNA, 19 bp, Homo sapiens
acaacagaaagtggacagt

SEQ ID NO: 5648 - DNA, 19 bp, Homo sapiens
actgtccactttctgttgt

SEQ ID NO: 5649 - DNA, 19 bp, Homo sapiens
caacagaaagtggacagtg

SEQ ID NO: 5650 - DNA, 19 bp, Homo sapiens
cactgtccactttctgttg

SEQ ID NO: 5651 - DNA, 19 bp, Homo sapiens
aacagaaagtggacagtgg

SEQ ID NO: 5652 - DNA, 19 bp, Homo sapiens
ccactgtccactttctgtt

SEQ ID NO: 5653 - DNA, 19 bp, Homo sapiens
acagaaagtggacagtggt

SEQ ID NO: 5654 - DNA, 19 bp, Homo sapiens
accactgtccactttctgt

SEQ ID NO: 5655 - DNA, 19 bp, Homo sapiens
cagaaagtggacagtggtt

SEQ ID NO: 5656 - DNA, 19 bp, Homo sapiens
aaccactgtccactttctg

SEQ ID NO: 5657 - DNA, 19 bp, Homo sapiens
agaaagtggacagtggttc

SEQ ID NO: 5658 - DNA, 19 bp, Homo sapiens
gaaccactgtccactttct

SEQ ID NO: 5659 - DNA, 19 bp, Homo sapiens
gaaagtggacagtggttca

SEQ ID NO: 5660 - DNA, 19 bp, Homo sapiens
tgaaccactgtccactttc

SEQ ID NO: 5661 - DNA, 19 bp, Homo sapiens
aaagtggacagtggttcac

SEQ ID NO: 5662 - DNA, 19 bp, Homo sapiens
gtgaaccactgtccacttt

SEQ ID NO: 5663 - DNA, 19 bp, Homo sapiens
aagtggacagtggttcacg

SEQ ID NO: 5664 - DNA, 19 bp, Homo sapiens
cgtgaaccactgtccactt

SEQ ID NO: 5665 - DNA, 19 bp, Homo sapiens
agtggacagtggttcacgc

SEQ ID NO: 5666 - DNA, 19 bp, Homo sapiens
gcgtgaaccactgtccact

SEQ ID NO: 5667 - DNA, 19 bp, Homo sapiens
gtggacagtggttcacgct

SEQ ID NO: 5668 - DNA, 19 bp, Homo sapiens
agcgtgaaccactgtccac

SEQ ID NO: 5669 - DNA, 19 bp, Homo sapiens
tggacagtggttcacgctg

SEQ ID NO: 5670 - DNA, 19 bp, Homo sapiens
cagcgtgaaccactgtcca

SEQ ID NO: 5671 - DNA, 19 bp, Homo sapiens
ggacagtggttcacgctgg

SEQ ID NO: 5672 - DNA, 19 bp, Homo sapiens
ccagcgtgaaccactgtcc

SEQ ID NO: 5673 - DNA, 19 bp, Homo sapiens
gacagtggttcacgctgga

SEQ ID NO: 5674 - DNA, 19 bp, Homo sapiens
tccagcgtgaaccactgtc

SEQ ID NO: 5675 - DNA, 19 bp, Homo sapiens
acagtggttcacgctggag

SEQ ID NO: 5676 - DNA, 19 bp, Homo sapiens
ctccagcgtgaaccactgt

SEQ ID NO: 5677 - DNA, 19 bp, Homo sapiens
cagtggttcacgctggagc

SEQ ID NO: 5678 - DNA, 19 bp, Homo sapiens
gctccagcgtgaaccactg

SEQ ID NO: 5679 - DNA, 19 bp, Homo sapiens
agtggttcacgctggagcc

SEQ ID NO: 5680 - DNA, 19 bp, Homo sapiens
ggctccagcgtgaaccact

SEQ ID NO: 5681 - DNA, 19 bp, Homo sapiens
gtggttcacgctggagcca

SEQ ID NO: 5682 - DNA, 19 bp, Homo sapiens
tggctccagcgtgaaccac

SEQ ID NO: 5683 - DNA, 19 bp, Homo sapiens
tggttcacgctggagccag

SEQ ID NO: 5684 - DNA, 19 bp, Homo sapiens
ctggctccagcgtgaacca

SEQ ID NO: 5685 - DNA, 19 bp, Homo sapiens
ggttcacgctggagccagg

SEQ ID NO: 5686 - DNA, 19 bp, Homo sapiens
cctggctccagcgtgaacc

SEQ ID NO: 5687 - DNA, 19 bp, Homo sapiens
gttcacgctggagccaggc

SEQ ID NO: 5688 - DNA, 19 bp, Homo sapiens
gcctggctccagcgtgaac

SEQ ID NO: 5689 - DNA, 19 bp, Homo sapiens
ttcacgctggagccaggcg

SEQ ID NO: 5690 - DNA, 19 bp, Homo sapiens
cgcctggctccagcgtgaa

SEQ ID NO: 5691 - DNA, 19 bp, Homo sapiens
tcacgctggagccaggcgg

SEQ ID NO: 5692 - DNA, 19 bp, Homo sapiens
ccgcctggctccagcgtga

SEQ ID NO: 5693 - DNA, 19 bp, Homo sapiens
cacgctggagccaggcgga

SEQ ID NO: 5694 - DNA, 19 bp, Homo sapiens
tccgcctggctccagcgtg

SEQ ID NO: 5695 - DNA, 19 bp, Homo sapiens
acgctggagccaggcggat

SEQ ID NO: 5696 - DNA, 19 bp, Homo sapiens
atccgcctggctccagcgt

SEQ ID NO: 5697 - DNA, 19 bp, Homo sapiens
cgctggagccaggcggatg

SEQ ID NO: 5698 - DNA, 19 bp, Homo sapiens
catccgcctggctccagcg

SEQ ID NO: 5699 - DNA, 19 bp, Homo sapiens
gctggagccaggcggatga

SEQ ID NO: 5700 - DNA, 19 bp, Homo sapiens
tcatccgcctggctccagc

SEQ ID NO: 5701 - DNA, 19 bp, Homo sapiens
ctggagccaggcggatgaa

SEQ ID NO: 5702 - DNA, 19 bp, Homo sapiens
ttcatccgcctggctccag

SEQ ID NO: 5703 - DNA, 19 bp, Homo sapiens
tggagccaggcggatgaaa

SEQ ID NO: 5704 - DNA, 19 bp, Homo sapiens
tttcatccgcctggctcca

SEQ ID NO: 5705 - DNA, 19 bp, Homo sapiens
ggagccaggcggatgaaag

SEQ ID NO: 5706 - DNA, 19 bp, Homo sapiens
ctttcatccgcctggctcc

SEQ ID NO: 5707 - DNA, 19 bp, Homo sapiens
gagccaggcggatgaaaga

SEQ ID NO: 5708 - DNA, 19 bp, Homo sapiens
tctttcatccgcctggctc

SEQ ID NO: 5709 - DNA, 19 bp, Homo sapiens
agccaggcggatgaaagag

SEQ ID NO: 5710 - DNA, 19 bp, Homo sapiens
ctctttcatccgcctggct

SEQ ID NO: 5711 - DNA, 19 bp, Homo sapiens
gccaggcggatgaaagaga

SEQ ID NO: 5712 - DNA, 19 bp, Homo sapiens
tctctttcatccgcctggc

SEQ ID NO: 5713 - DNA, 19 bp, Homo sapiens
ccaggcggatgaaagagaa

SEQ ID NO: 5714 - DNA, 19 bp, Homo sapiens
ttctctttcatccgcctgg

SEQ ID NO: 5715 - DNA, 19 bp, Homo sapiens
caggcggatgaaagagaag

SEQ ID NO: 5716 - DNA, 19 bp, Homo sapiens
cttctctttcatccgcctg

SEQ ID NO: 5717 - DNA, 19 bp, Homo sapiens
aggcggatgaaagagaagt

SEQ ID NO: 5718 - DNA, 19 bp, Homo sapiens
acttctctttcatccgcct

SEQ ID NO: 5719 - DNA, 19 bp, Homo sapiens
ggcggatgaaagagaagtg

SEQ ID NO: 5720 - DNA, 19 bp, Homo sapiens
cacttctctttcatccgcc

SEQ ID NO: 5721 - DNA, 19 bp, Homo sapiens
gcggatgaaagagaagtgg

SEQ ID NO: 5722 - DNA, 19 bp, Homo sapiens
ccacttctctttcatccgc

SEQ ID NO: 5723 - DNA, 19 bp, Homo sapiens
cggatgaaagagaagtggg

SEQ ID NO: 5724 - DNA, 19 bp, Homo sapiens
cccacttctctttcatccg

SEQ ID NO: 5725 - DNA, 19 bp, Homo sapiens
ggatgaaagagaagtggga

SEQ ID NO: 5726 - DNA, 19 bp, Homo sapiens
tcccacttctctttcatcc

SEQ ID NO: 5727 - DNA, 19 bp, Homo sapiens
gatgaaagagaagtgggag

SEQ ID NO: 5728 - DNA, 19 bp, Homo sapiens
ctcccacttctctttcatc

SEQ ID NO: 5729 - DNA, 19 bp, Homo sapiens
atgaaagagaagtgggaga

SEQ ID NO: 5730 - DNA, 19 bp, Homo sapiens
tctcccacttctctttcat

SEQ ID NO: 5731 - DNA, 19 bp, Homo sapiens
tgaaagagaagtgggagaa

SEQ ID NO: 5732 - DNA, 19 bp, Homo sapiens
ttctcccacttctctttca

SEQ ID NO: 5733 - DNA, 19 bp, Homo sapiens
gaaagagaagtgggagaag

SEQ ID NO: 5734 - DNA, 19 bp, Homo sapiens
cttctcccacttctctttc

SEQ ID NO: 5735 - DNA, 19 bp, Homo sapiens
aaagagaagtgggagaagg

SEQ ID NO: 5736 - DNA, 19 bp, Homo sapiens
ccttctcccacttctcttt

SEQ ID NO: 5737 - DNA, 19 bp, Homo sapiens
aagagaagtgggagaagga

SEQ ID NO: 5738 - DNA, 19 bp, Homo sapiens
tccttctcccacttctctt

SEQ ID NO: 5739 - DNA, 19 bp, Homo sapiens
agagaagtgggagaaggat

SEQ ID NO: 5740 - DNA, 19 bp, Homo sapiens
atccttctcccacttctct

SEQ ID NO: 5741 - DNA, 19 bp, Homo sapiens
gagaagtgggagaaggata

SEQ ID NO: 5742 - DNA, 19 bp, Homo sapiens
tatccttctcccacttctc

SEQ ID NO: 5743 - DNA, 19 bp, Homo sapiens
agaagtgggagaaggatag

SEQ ID NO: 5744 - DNA, 19 bp, Homo sapiens
ctatccttctcccacttct

SEQ ID NO: 5745 - DNA, 19 bp, Homo sapiens
gaagtgggagaaggatagc

SEQ ID NO: 5746 - DNA, 19 bp, Homo sapiens
gctatccttctcccacttc

SEQ ID NO: 5747 - DNA, 19 bp, Homo sapiens
aagtgggagaaggatagcg

SEQ ID NO: 5748 - DNA, 19 bp, Homo sapiens
cgctatccttctcccactt

SEQ ID NO: 5749 - DNA, 19 bp, Homo sapiens
agtgggagaaggatagcgg

SEQ ID NO: 5750 - DNA, 19 bp, Homo sapiens
ccgctatccttctcccact

SEQ ID NO: 5751 - DNA, 19 bp, Homo sapiens
gtgggagaaggatagcgga

SEQ ID NO: 5752 - DNA, 19 bp, Homo sapiens
tccgctatccttctcccac

SEQ ID NO: 5753 - DNA, 19 bp, Homo sapiens
tgggagaaggatagcggac

SEQ ID NO: 5754 - DNA, 19 bp, Homo sapiens
gtccgctatccttctccca

SEQ ID NO: 5755 - DNA, 19 bp, Homo sapiens
gggagaaggatagcggact

SEQ ID NO: 5756 - DNA, 19 bp, Homo sapiens
agtccgctatccttctccc

SEQ ID NO: 5757 - DNA, 19 bp, Homo sapiens
ggagaaggatagcggactg

SEQ ID NO: 5758 - DNA, 19 bp, Homo sapiens
cagtccgctatccttctcc

SEQ ID NO: 5759 - DNA, 19 bp, Homo sapiens
gagaaggatagcggactga

SEQ ID NO: 5760 - DNA, 19 bp, Homo sapiens
tcagtccgctatccttctc

SEQ ID NO: 5761 - DNA, 19 bp, Homo sapiens
agaaggatagcggactgac

SEQ ID NO: 5762 - DNA, 19 bp, Homo sapiens
gtcagtccgctatccttct

SEQ ID NO: 5763 - DNA, 19 bp, Homo sapiens
gaaggatagcggactgacc

SEQ ID NO: 5764 - DNA, 19 bp, Homo sapiens
ggtcagtccgctatccttc

SEQ ID NO: 5765 - DNA, 19 bp, Homo sapiens
aaggatagcggactgacca

SEQ ID NO: 5766 - DNA, 19 bp, Homo sapiens
tggtcagtccgctatcctt

SEQ ID NO: 5767 - DNA, 19 bp, Homo sapiens
aggatagcggactgaccac

SEQ ID NO: 5768 - DNA, 19 bp, Homo sapiens
gtggtcagtccgctatcct

SEQ ID NO: 5769 - DNA, 19 bp, Homo sapiens
ggatagcggactgaccacc

SEQ ID NO: 5770 - DNA, 19 bp, Homo sapiens
ggtggtcagtccgctatcc

SEQ ID NO: 5771 - DNA, 19 bp, Homo sapiens
gatagcggactgaccacct

SEQ ID NO: 5772 - DNA, 19 bp, Homo sapiens
aggtggtcagtccgctatc

SEQ ID NO: 5773 - DNA, 19 bp, Homo sapiens
atagcggactgaccacctt

SEQ ID NO: 5774 - DNA, 19 bp, Homo sapiens
aaggtggtcagtccgctat

SEQ ID NO: 5775 - DNA, 19 bp, Homo sapiens
tagcggactgaccaccttc

SEQ ID NO: 5776 - DNA, 19 bp, Homo sapiens
gaaggtggtcagtccgcta

SEQ ID NO: 5777 - DNA, 19 bp, Homo sapiens
agcggactgaccaccttct

SEQ ID NO: 5778 - DNA, 19 bp, Homo sapiens
agaaggtggtcagtccgct

SEQ ID NO: 5779 - DNA, 19 bp, Homo sapiens
gcggactgaccaccttctt

SEQ ID NO: 5780 - DNA, 19 bp, Homo sapiens
aagaaggtggtcagtccgc

SEQ ID NO: 5781 - DNA, 19 bp, Homo sapiens
cggactgaccaccttcttc

SEQ ID NO: 5782 - DNA, 19 bp, Homo sapiens
gaagaaggtggtcagtccg

SEQ ID NO: 5783 - DNA, 19 bp, Homo sapiens
ggactgaccaccttcttca

SEQ ID NO: 5784 - DNA, 19 bp, Homo sapiens
tgaagaaggtggtcagtcc

SEQ ID NO: 5785 - DNA, 19 bp, Homo sapiens
gactgaccaccttcttcaa

SEQ ID NO: 5786 - DNA, 19 bp, Homo sapiens
ttgaagaaggtggtcagtc

SEQ ID NO: 5787 - DNA, 19 bp, Homo sapiens
actgaccaccttcttcaag

SEQ ID NO: 5788 - DNA, 19 bp, Homo sapiens
cttgaagaaggtggtcagt

SEQ ID NO: 5789 - DNA, 19 bp, Homo sapiens
ctgaccaccttcttcaaga

SEQ ID NO: 5790 - DNA, 19 bp, Homo sapiens
tcttgaagaaggtggtcag

SEQ ID NO: 5791 - DNA, 19 bp, Homo sapiens
tgaccaccttcttcaagat

SEQ ID NO: 5792 - DNA, 19 bp, Homo sapiens
atcttgaagaaggtggtca

SEQ ID NO: 5793 - DNA, 19 bp, Homo sapiens
gaccaccttcttcaagatg

SEQ ID NO: 5794 - DNA, 19 bp, Homo sapiens
catcttgaagaaggtggtc

SEQ ID NO: 5795 - DNA, 19 bp, Homo sapiens
accaccttcttcaagatgg

SEQ ID NO: 5796 - DNA, 19 bp, Homo sapiens
ccatcttgaagaaggtggt

SEQ ID NO: 5797 - DNA, 19 bp, Homo sapiens
ccaccttcttcaagatggt

SEQ ID NO: 5798 - DNA, 19 bp, Homo sapiens
accatcttgaagaaggtgg

SEQ ID NO: 5799 - DNA, 19 bp, Homo sapiens
caccttcttcaagatggtc

SEQ ID NO: 5800 - DNA, 19 bp, Homo sapiens
gaccatcttgaagaaggtg

SEQ ID NO: 5801 - DNA, 19 bp, Homo sapiens
accttcttcaagatggtct

SEQ ID NO: 5802 - DNA, 19 bp, Homo sapiens
agaccatcttgaagaaggt

SEQ ID NO: 5803 - DNA, 19 bp, Homo sapiens
ccttcttcaagatggtctc

SEQ ID NO: 5804 - DNA, 19 bp, Homo sapiens
gagaccatcttgaagaagg

SEQ ID NO: 5805 - DNA, 19 bp, Homo sapiens
cttcttcaagatggtctca

SEQ ID NO: 5806 - DNA, 19 bp, Homo sapiens
tgagaccatcttgaagaag

SEQ ID NO: 5807 - DNA, 19 bp, Homo sapiens
ttcttcaagatggtctcaa

SEQ ID NO: 5808 - DNA, 19 bp, Homo sapiens
ttgagaccatcttgaagaa

SEQ ID NO: 5809 - DNA, 19 bp, Homo sapiens
tcttcaagatggtctcaat

SEQ ID NO: 5810 - DNA, 19 bp, Homo sapiens
attgagaccatcttgaaga

SEQ ID NO: 5811 - DNA, 19 bp, Homo sapiens
cttcaagatggtctcaatg

SEQ ID NO: 5812 - DNA, 19 bp, Homo sapiens
cattgagaccatcttgaag

SEQ ID NO: 5813 - DNA, 19 bp, Homo sapiens
ttcaagatggtctcaatga

SEQ ID NO: 5814 - DNA, 19 bp, Homo sapiens
tcattgagaccatcttgaa

SEQ ID NO: 5815 - DNA, 19 bp, Homo sapiens
tcaagatggtctcaatgag

SEQ ID NO: 5816 - DNA, 19 bp, Homo sapiens
ctcattgagaccatcttga

SEQ ID NO: 5817 - DNA, 19 bp, Homo sapiens
caagatggtctcaatgaga

SEQ ID NO: 5818 - DNA, 19 bp, Homo sapiens
tctcattgagaccatcttg

SEQ ID NO: 5819 - DNA, 19 bp, Homo sapiens
aagatggtctcaatgagag

SEQ ID NO: 5820 - DNA, 19 bp, Homo sapiens
ctctcattgagaccatctt

SEQ ID NO: 5821 - DNA, 19 bp, Homo sapiens
agatggtctcaatgagaga

SEQ ID NO: 5822 - DNA, 19 bp, Homo sapiens
tctctcattgagaccatct

SEQ ID NO: 5823 - DNA, 19 bp, Homo sapiens
gatggtctcaatgagagac

SEQ ID NO: 5824 - DNA, 19 bp, Homo sapiens
gtctctcattgagaccatc

SEQ ID NO: 5825 - DNA, 19 bp, Homo sapiens
atggtctcaatgagagact

SEQ ID NO: 5826 - DNA, 19 bp, Homo sapiens
agtctctcattgagaccat

SEQ ID NO: 5827 - DNA, 19 bp, Homo sapiens
tggtctcaatgagagactg

SEQ ID NO: 5828 - DNA, 19 bp, Homo sapiens
cagtctctcattgagacca

SEQ ID NO: 5829 - DNA, 19 bp, Homo sapiens
ggtctcaatgagagactgc

SEQ ID NO: 5830 - DNA, 19 bp, Homo sapiens
gcagtctctcattgagacc

SEQ ID NO: 5831 - DNA, 19 bp, Homo sapiens
gtctcaatgagagactgca

SEQ ID NO: 5832 - DNA, 19 bp, Homo sapiens
tgcagtctctcattgagac

SEQ ID NO: 5833 - DNA, 19 bp, Homo sapiens
tctcaatgagagactgcaa

SEQ ID NO: 5834 - DNA, 19 bp, Homo sapiens
ttgcagtctctcattgaga

SEQ ID NO: 5835 - DNA, 19 bp, Homo sapiens
ctcaatgagagactgcaag

SEQ ID NO: 5836 - DNA, 19 bp, Homo sapiens
cttgcagtctctcattgag

SEQ ID NO: 5837 - DNA, 19 bp, Homo sapiens
tcaatgagagactgcaaga

SEQ ID NO: 5838 - DNA, 19 bp, Homo sapiens
tcttgcagtctctcattga

SEQ ID NO: 5839 - DNA, 19 bp, Homo sapiens
caatgagagactgcaagag

SEQ ID NO: 5840 - DNA, 19 bp, Homo sapiens
ctcttgcagtctctcattg

SEQ ID NO: 5841 - DNA, 19 bp, Homo sapiens
aatgagagactgcaagagc

SEQ ID NO: 5842 - DNA, 19 bp, Homo sapiens
gctcttgcagtctctcatt

SEQ ID NO: 5843 - DNA, 19 bp, Homo sapiens
atgagagactgcaagagct

SEQ ID NO: 5844 - DNA, 19 bp, Homo sapiens
agctcttgcagtctctcat

SEQ ID NO: 5845 - DNA, 19 bp, Homo sapiens
tgagagactgcaagagctg

SEQ ID NO: 5846 - DNA, 19 bp, Homo sapiens
cagctcttgcagtctctca

SEQ ID NO: 5847 - DNA, 19 bp, Homo sapiens
gagagactgcaagagctgg

SEQ ID NO: 5848 - DNA, 19 bp, Homo sapiens
ccagctcttgcagtctctc

SEQ ID NO: 5849 - DNA, 19 bp, Homo sapiens
agagactgcaagagctggc

SEQ ID NO: 5850 - DNA, 19 bp, Homo sapiens
gccagctcttgcagtctct

SEQ ID NO: 5851 - DNA, 19 bp, Homo sapiens
gagactgcaagagctggct

SEQ ID NO: 5852 - DNA, 19 bp, Homo sapiens
agccagctcttgcagtctc

SEQ ID NO: 5853 - DNA, 19 bp, Homo sapiens
agactgcaagagctggctt

SEQ ID NO: 5854 - DNA, 19 bp, Homo sapiens
aagccagctcttgcagtct

SEQ ID NO: 5855 - DNA, 19 bp, Homo sapiens
gactgcaagagctggctta

SEQ ID NO: 5856 - DNA, 19 bp, Homo sapiens
taagccagctcttgcagtc

SEQ ID NO: 5857 - DNA, 19 bp, Homo sapiens
actgcaagagctggcttag

SEQ ID NO: 5858 - DNA, 19 bp, Homo sapiens
ctaagccagctcttgcagt

SEQ ID NO: 5859 - DNA, 19 bp, Homo sapiens
ctgcaagagctggcttagg

SEQ ID NO: 5860 - DNA, 19 bp, Homo sapiens
cctaagccagctcttgcag

SEQ ID NO: 5861 - DNA, 19 bp, Homo sapiens
tgcaagagctggcttaggg

SEQ ID NO: 5862 - DNA, 19 bp, Homo sapiens
ccctaagccagctcttgca

SEQ ID NO: 5863 - DNA, 19 bp, Homo sapiens
gcaagagctggcttaggga

SEQ ID NO: 5864 - DNA, 19 bp, Homo sapiens
tccctaagccagctcttgc

SEQ ID NO: 5865 - DNA, 19 bp, Homo sapiens
caagagctggcttagggac

SEQ ID NO: 5866 - DNA, 19 bp, Homo sapiens
gtccctaagccagctcttg

SEQ ID NO: 5867 - DNA, 19 bp, Homo sapiens
aagagctggcttagggact

SEQ ID NO: 5868 - DNA, 19 bp, Homo sapiens
agtccctaagccagctctt

SEQ ID NO: 5869 - DNA, 19 bp, Homo sapiens
agagctggcttagggactt

SEQ ID NO: 5870 - DNA, 19 bp, Homo sapiens
aagtccctaagccagctct

SEQ ID NO: 5871 - DNA, 19 bp, Homo sapiens
gagctggcttagggacttc

SEQ ID NO: 5872 - DNA, 19 bp, Homo sapiens
gaagtccctaagccagctc

SEQ ID NO: 5873 - DNA, 19 bp, Homo sapiens
agctggcttagggacttcc

SEQ ID NO: 5874 - DNA, 19 bp, Homo sapiens
ggaagtccctaagccagct

SEQ ID NO: 5875 - DNA, 19 bp, Homo sapiens
gctggcttagggacttcct

SEQ ID NO: 5876 - DNA, 19 bp, Homo sapiens
aggaagtccctaagccagc

SEQ ID NO: 5877 - DNA, 19 bp, Homo sapiens
ctggcttagggacttcctg

SEQ ID NO: 5878 - DNA, 19 bp, Homo sapiens
caggaagtccctaagccag

SEQ ID NO: 5879 - DNA, 19 bp, Homo sapiens
tggcttagggacttcctga

SEQ ID NO: 5880 - DNA, 19 bp, Homo sapiens
tcaggaagtccctaagcca

SEQ ID NO: 5881 - DNA, 19 bp, Homo sapiens
ggcttagggacttcctgat

SEQ ID NO: 5882 - DNA, 19 bp, Homo sapiens
atcaggaagtccctaagcc

SEQ ID NO: 5883 - DNA, 19 bp, Homo sapiens
gcttagggacttcctgatg

SEQ ID NO: 5884 - DNA, 19 bp, Homo sapiens
catcaggaagtccctaagc

SEQ ID NO: 5885 - DNA, 19 bp, Homo sapiens
cttagggacttcctgatgc

SEQ ID NO: 5886 - DNA, 19 bp, Homo sapiens
gcatcaggaagtccctaag

SEQ ID NO: 5887 - DNA, 19 bp, Homo sapiens
ttagggacttcctgatgca

SEQ ID NO: 5888 - DNA, 19 bp, Homo sapiens
tgcatcaggaagtccctaa

SEQ ID NO: 5889 - DNA, 19 bp, Homo sapiens
tagggacttcctgatgcac

SEQ ID NO: 5890 - DNA, 19 bp, Homo sapiens
gtgcatcaggaagtcccta

SEQ ID NO: 5891 - DNA, 19 bp, Homo sapiens
agggacttcctgatgcaca

SEQ ID NO: 5892 - DNA, 19 bp, Homo sapiens
tgtgcatcaggaagtccct

SEQ ID NO: 5893 - DNA, 19 bp, Homo sapiens
gggacttcctgatgcacag

SEQ ID NO: 5894 - DNA, 19 bp, Homo sapiens
ctgtgcatcaggaagtccc

SEQ ID NO: 5895 - DNA, 19 bp, Homo sapiens
ggacttcctgatgcacagg

SEQ ID NO: 5896 - DNA, 19 bp, Homo sapiens
cctgtgcatcaggaagtcc

SEQ ID NO: 5897 - DNA, 19 bp, Homo sapiens
gacttcctgatgcacagga

SEQ ID NO: 5898 - DNA, 19 bp, Homo sapiens
tcctgtgcatcaggaagtc

SEQ ID NO: 5899 - DNA, 19 bp, Homo sapiens
acttcctgatgcacaggaa

SEQ ID NO: 5900 - DNA, 19 bp, Homo sapiens
ttcctgtgcatcaggaagt

SEQ ID NO: 5901 - DNA, 19 bp, Homo sapiens
cttcctgatgcacaggaag

SEQ ID NO: 5902 - DNA, 19 bp, Homo sapiens
cttcctgtgcatcaggaag

SEQ ID NO: 5903 - DNA, 19 bp, Homo sapiens
ttcctgatgcacaggaaga

SEQ ID NO: 5904 - DNA, 19 bp, Homo sapiens
tcttcctgtgcatcaggaa

SEQ ID NO: 5905 - DNA, 19 bp, Homo sapiens
tcctgatgcacaggaagaa

SEQ ID NO: 5906 - DNA, 19 bp, Homo sapiens
ttcttcctgtgcatcagga

SEQ ID NO: 5907 - DNA, 19 bp, Homo sapiens
cctgatgcacaggaagaag

SEQ ID NO: 5908 - DNA, 19 bp, Homo sapiens
cttcttcctgtgcatcagg

SEQ ID NO: 5909 - DNA, 19 bp, Homo sapiens
ctgatgcacaggaagaaga

SEQ ID NO: 5910 - DNA, 19 bp, Homo sapiens
tcttcttcctgtgcatcag

SEQ ID NO: 5911 - DNA, 19 bp, Homo sapiens
tgatgcacaggaagaagag

SEQ ID NO: 5912 - DNA, 19 bp, Homo sapiens
ctcttcttcctgtgcatca

SEQ ID NO: 5913 - DNA, 19 bp, Homo sapiens
gatgcacaggaagaagagg

SEQ ID NO: 5914 - DNA, 19 bp, Homo sapiens
cctcttcttcctgtgcatc

SEQ ID NO: 5915 - DNA, 19 bp, Homo sapiens
atgcacaggaagaagaggc

SEQ ID NO: 5916 - DNA, 19 bp, Homo sapiens
gcctcttcttcctgtgcat

SEQ ID NO: 5917 - DNA, 19 bp, Homo sapiens
tgcacaggaagaagaggct

SEQ ID NO: 5918 - DNA, 19 bp, Homo sapiens
agcctcttcttcctgtgca

SEQ ID NO: 5919 - DNA, 19 bp, Homo sapiens
gcacaggaagaagaggctg

SEQ ID NO: 5920 - DNA, 19 bp, Homo sapiens
cagcctcttcttcctgtgc

SEQ ID NO: 5921 - DNA, 19 bp, Homo sapiens
cacaggaagaagaggctgg

SEQ ID NO: 5922 - DNA, 19 bp, Homo sapiens
ccagcctcttcttcctgtg

SEQ ID NO: 5923 - DNA, 19 bp, Homo sapiens
acaggaagaagaggctgga

SEQ ID NO: 5924 - DNA, 19 bp, Homo sapiens
tccagcctcttcttcctgt

SEQ ID NO: 5925 - DNA, 19 bp, Homo sapiens
caggaagaagaggctggaa

SEQ ID NO: 5926 - DNA, 19 bp, Homo sapiens
ttccagcctcttcttcctg

SEQ ID NO: 5927 - DNA, 19 bp, Homo sapiens
aggaagaagaggctggaac

SEQ ID NO: 5928 - DNA, 19 bp, Homo sapiens
gttccagcctcttcttcct

SEQ ID NO: 5929 - DNA, 19 bp, Homo sapiens
ggaagaagaggctggaacc

SEQ ID NO: 5930 - DNA, 19 bp, Homo sapiens
ggttccagcctcttcttcc

SEQ ID NO: 5931 - DNA, 19 bp, Homo sapiens
gaagaagaggctggaaccc

SEQ ID NO: 5932 - DNA, 19 bp, Homo sapiens
gggttccagcctcttcttc

SEQ ID NO: 5933 - DNA, 19 bp, Homo sapiens
aagaagaggctggaaccca

SEQ ID NO: 5934 - DNA, 19 bp, Homo sapiens
tgggttccagcctcttctt

SEQ ID NO: 5935 - DNA, 19 bp, Homo sapiens
agaagaggctggaacccac

SEQ ID NO: 5936 - DNA, 19 bp, Homo sapiens
gtgggttccagcctcttct

SEQ ID NO: 5937 - DNA, 19 bp, Homo sapiens
gaagaggctggaacccaca

SEQ ID NO: 5938 - DNA, 19 bp, Homo sapiens
tgtgggttccagcctcttc

SEQ ID NO: 5939 - DNA, 19 bp, Homo sapiens
aagaggctggaacccacag

SEQ ID NO: 5940 - DNA, 19 bp, Homo sapiens
ctgtgggttccagcctctt

SEQ ID NO: 5941 - DNA, 19 bp, Homo sapiens
agaggctggaacccacagc

SEQ ID NO: 5942 - DNA, 19 bp, Homo sapiens
gctgtgggttccagcctct

SEQ ID NO: 5943 - DNA, 19 bp, Homo sapiens
gaggctggaacccacagca

SEQ ID NO: 5944 - DNA, 19 bp, Homo sapiens
tgctgtgggttccagcctc

SEQ ID NO: 5945 - DNA, 19 bp, Homo sapiens
aggctggaacccacagcac

SEQ ID NO: 5946 - DNA, 19 bp, Homo sapiens
gtgctgtgggttccagcct

SEQ ID NO: 5947 - DNA, 19 bp, Homo sapiens
ggctggaacccacagcacc

SEQ ID NO: 5948 - DNA, 19 bp, Homo sapiens
ggtgctgtgggttccagcc

SEQ ID NO: 5949 - DNA, 19 bp, Homo sapiens
gctggaacccacagcacca

SEQ ID NO: 5950 - DNA, 19 bp, Homo sapiens
tggtgctgtgggttccagc

SEQ ID NO: 5951 - DNA, 19 bp, Homo sapiens
ctggaacccacagcaccac

SEQ ID NO: 5952 - DNA, 19 bp, Homo sapiens
gtggtgctgtgggttccag

SEQ ID NO: 5953 - DNA, 19 bp, Homo sapiens
tggaacccacagcaccacc

SEQ ID NO: 5954 - DNA, 19 bp, Homo sapiens
ggtggtgctgtgggttcca

SEQ ID NO: 5955 - DNA, 19 bp, Homo sapiens
ggaacccacagcaccaccc

SEQ ID NO: 5956 - DNA, 19 bp, Homo sapiens
gggtggtgctgtgggttcc

SEQ ID NO: 5957 - DNA, 19 bp, Homo sapiens
gaacccacagcaccaccca

SEQ ID NO: 5958 - DNA, 19 bp, Homo sapiens
tgggtggtgctgtgggttc

SEQ ID NO: 5959 - DNA, 19 bp, Homo sapiens
aacccacagcaccacccac

SEQ ID NO: 5960 - DNA, 19 bp, Homo sapiens
gtgggtggtgctgtgggtt

SEQ ID NO: 5961 - DNA, 19 bp, Homo sapiens
acccacagcaccacccacc

SEQ ID NO: 5962 - DNA, 19 bp, Homo sapiens
ggtgggtggtgctgtgggt

SEQ ID NO: 5963 - DNA, 19 bp, Homo sapiens
cccacagcaccacccacca

SEQ ID NO: 5964 - DNA, 19 bp, Homo sapiens
tggtgggtggtgctgtggg

SEQ ID NO: 5965 - DNA, 19 bp, Homo sapiens
ccacagcaccacccaccat

SEQ ID NO: 5966 - DNA, 19 bp, Homo sapiens
atggtgggtggtgctgtgg

SEQ ID NO: 5967 - DNA, 19 bp, Homo sapiens
cacagcaccacccaccatg

SEQ ID NO: 5968 - DNA, 19 bp, Homo sapiens
catggtgggtggtgctgtg

SEQ ID NO: 5969 - DNA, 19 bp, Homo sapiens
acagcaccacccaccatgg

SEQ ID NO: 5970 - DNA, 19 bp, Homo sapiens
ccatggtgggtggtgctgt

SEQ ID NO: 5971 - DNA, 19 bp, Homo sapiens
cagcaccacccaccatggc

SEQ ID NO: 5972 - DNA, 19 bp, Homo sapiens
gccatggtgggtggtgctg

SEQ ID NO: 5973 - DNA, 19 bp, Homo sapiens
agcaccacccaccatggcc

SEQ ID NO: 5974 - DNA, 19 bp, Homo sapiens
ggccatggtgggtggtgct

SEQ ID NO: 5975 - DNA, 19 bp, Homo sapiens
gcaccacccaccatggccc

SEQ ID NO: 5976 - DNA, 19 bp, Homo sapiens
gggccatggtgggtggtgc

SEQ ID NO: 5977 - DNA, 19 bp, Homo sapiens
caccacccaccatggcccc

SEQ ID NO: 5978 - DNA, 19 bp, Homo sapiens
ggggccatggtgggtggtg

SEQ ID NO: 5979 - DNA, 19 bp, Homo sapiens
accacccaccatggcccca

SEQ ID NO: 5980 - DNA, 19 bp, Homo sapiens
tggggccatggtgggtggt

SEQ ID NO: 5981 - DNA, 19 bp, Homo sapiens
ccacccaccatggccccag

SEQ ID NO: 5982 - DNA, 19 bp, Homo sapiens
ctggggccatggtgggtgg

SEQ ID NO: 5983 - DNA, 19 bp, Homo sapiens
cacccaccatggccccagg

SEQ ID NO: 5984 - DNA, 19 bp, Homo sapiens
cctggggccatggtgggtg

SEQ ID NO: 5985 - DNA, 19 bp, Homo sapiens
acccaccatggccccaggc

SEQ ID NO: 5986 - DNA, 19 bp, Homo sapiens
gcctggggccatggtgggt

SEQ ID NO: 5987 - DNA, 19 bp, Homo sapiens
cccaccatggccccaggct

SEQ ID NO: 5988 - DNA, 19 bp, Homo sapiens
agcctggggccatggtggg

SEQ ID NO: 5989 - DNA, 19 bp, Homo sapiens
ccaccatggccccaggctt

SEQ ID NO: 5990 - DNA, 19 bp, Homo sapiens
aagcctggggccatggtgg

SEQ ID NO: 5991 - DNA, 19 bp, Homo sapiens
caccatggccccaggctta

SEQ ID NO: 5992 - DNA, 19 bp, Homo sapiens
taagcctggggccatggtg

SEQ ID NO: 5993 - DNA, 19 bp, Homo sapiens
accatggccccaggcttag

SEQ ID NO: 5994 - DNA, 19 bp, Homo sapiens
ctaagcctggggccatggt

SEQ ID NO: 5995 - DNA, 19 bp, Homo sapiens
ccatggccccaggcttagc

SEQ ID NO: 5996 - DNA, 19 bp, Homo sapiens
gctaagcctggggccatgg

SEQ ID NO: 5997 - DNA, 19 bp, Homo sapiens
catggccccaggcttagct

SEQ ID NO: 5998 - DNA, 19 bp, Homo sapiens
agctaagcctggggccatg

SEQ ID NO: 5999 - DNA, 19 bp, Homo sapiens
atggccccaggcttagctc

SEQ ID NO: 6000 - DNA, 19 bp, Homo sapiens
gagctaagcctggggccat

SEQ ID NO: 6001 - DNA, 19 bp, Homo sapiens
tggccccaggcttagctca

SEQ ID NO: 6002 - DNA, 19 bp, Homo sapiens
tgagctaagcctggggcca

SEQ ID NO: 6003 - DNA, 19 bp, Homo sapiens
ggccccaggcttagctcaa

SEQ ID NO: 6004 - DNA, 19 bp, Homo sapiens
ttgagctaagcctggggcc

SEQ ID NO: 6005 - DNA, 19 bp, Homo sapiens
gccccaggcttagctcaac

SEQ ID NO: 6006 - DNA, 19 bp, Homo sapiens
gttgagctaagcctggggc

SEQ ID NO: 6007 - DNA, 19 bp, Homo sapiens
ccccaggcttagctcaacc

SEQ ID NO: 6008 - DNA, 19 bp, Homo sapiens
ggttgagctaagcctgggg

SEQ ID NO: 6009 - DNA, 19 bp, Homo sapiens
cccaggcttagctcaaccc

SEQ ID NO: 6010 - DNA, 19 bp, Homo sapiens
gggttgagctaagcctggg

SEQ ID NO: 6011 - DNA, 19 bp, Homo sapiens
ccaggcttagctcaaccca

SEQ ID NO: 6012 - DNA, 19 bp, Homo sapiens
tgggttgagctaagcctgg

SEQ ID NO: 6013 - DNA, 19 bp, Homo sapiens
caggcttagctcaacccaa

SEQ ID NO: 6014 - DNA, 19 bp, Homo sapiens
ttgggttgagctaagcctg

SEQ ID NO: 6015 - DNA, 19 bp, Homo sapiens
aggcttagctcaacccaaa

SEQ ID NO: 6016 - DNA, 19 bp, Homo sapiens
tttgggttgagctaagcct

SEQ ID NO: 6017 - DNA, 19 bp, Homo sapiens
ggcttagctcaacccaaag

SEQ ID NO: 6018 - DNA, 19 bp, Homo sapiens
ctttgggttgagctaagcc

SEQ ID NO: 6019 - DNA, 19 bp, Homo sapiens
gcttagctcaacccaaagc

SEQ ID NO: 6020 - DNA, 19 bp, Homo sapiens
gctttgggttgagctaagc

SEQ ID NO: 6021 - DNA, 19 bp, Homo sapiens
cttagctcaacccaaagcc

SEQ ID NO: 6022 - DNA, 19 bp, Homo sapiens
ggctttgggttgagctaag

SEQ ID NO: 6023 - DNA, 19 bp, Homo sapiens
ttagctcaacccaaagcca

SEQ ID NO: 6024 - DNA, 19 bp, Homo sapiens
tggctttgggttgagctaa

SEQ ID NO: 6025 - DNA, 19 bp, Homo sapiens
tagctcaacccaaagccat

SEQ ID NO: 6026 - DNA, 19 bp, Homo sapiens
atggctttgggttgagcta

SEQ ID NO: 6027 - DNA, 19 bp, Homo sapiens
agctcaacccaaagccata

SEQ ID NO: 6028 - DNA, 19 bp, Homo sapiens
tatggctttgggttgagct

SEQ ID NO: 6029 - DNA, 19 bp, Homo sapiens
gctcaacccaaagccatag

SEQ ID NO: 6030 - DNA, 19 bp, Homo sapiens
ctatggctttgggttgagc

SEQ ID NO: 6031 - DNA, 19 bp, Homo sapiens
ctcaacccaaagccatagc

SEQ ID NO: 6032 - DNA, 19 bp, Homo sapiens
gctatggctttgggttgag

SEQ ID NO: 6033 - DNA, 19 bp, Homo sapiens
tcaacccaaagccatagcc

SEQ ID NO: 6034 - DNA, 19 bp, Homo sapiens
ggctatggctttgggttga

SEQ ID NO: 6035 - DNA, 19 bp, Homo sapiens
caacccaaagccatagcca

SEQ ID NO: 6036 - DNA, 19 bp, Homo sapiens
tggctatggctttgggttg

SEQ ID NO: 6037 - DNA, 19 bp, Homo sapiens
aacccaaagccatagccac

SEQ ID NO: 6038 - DNA, 19 bp, Homo sapiens
gtggctatggctttgggtt

SEQ ID NO: 6039 - DNA, 19 bp, Homo sapiens
acccaaagccatagccacc

SEQ ID NO: 6040 - DNA, 19 bp, Homo sapiens
ggtggctatggctttgggt

SEQ ID NO: 6041 - DNA, 19 bp, Homo sapiens
cccaaagccatagccacca

SEQ ID NO: 6042 - DNA, 19 bp, Homo sapiens
tggtggctatggctttggg

SEQ ID NO: 6043 - DNA, 19 bp, Homo sapiens
ccaaagccatagccaccac

SEQ ID NO: 6044 - DNA, 19 bp, Homo sapiens
gtggtggctatggctttgg

SEQ ID NO: 6045 - DNA, 19 bp, Homo sapiens
caaagccatagccaccacc

SEQ ID NO: 6046 - DNA, 19 bp, Homo sapiens
ggtggtggctatggctttg

SEQ ID NO: 6047 - DNA, 19 bp, Homo sapiens
aaagccatagccaccaccc

SEQ ID NO: 6048 - DNA, 19 bp, Homo sapiens
gggtggtggctatggcttt

SEQ ID NO: 6049 - DNA, 19 bp, Homo sapiens
aagccatagccaccaccct

SEQ ID NO: 6050 - DNA, 19 bp, Homo sapiens
agggtggtggctatggctt

SEQ ID NO: 6051 - DNA, 19 bp, Homo sapiens
agccatagccaccaccctc

SEQ ID NO: 6052 - DNA, 19 bp, Homo sapiens
gagggtggtggctatggct

SEQ ID NO: 6053 - DNA, 19 bp, Homo sapiens
gccatagccaccaccctca

SEQ ID NO: 6054 - DNA, 19 bp, Homo sapiens
tgagggtggtggctatggc

SEQ ID NO: 6055 - DNA, 19 bp, Homo sapiens
ccatagccaccaccctcag

SEQ ID NO: 6056 - DNA, 19 bp, Homo sapiens
ctgagggtggtggctatgg

SEQ ID NO: 6057 - DNA, 19 bp, Homo sapiens
catagccaccaccctcagt

SEQ ID NO: 6058 - DNA, 19 bp, Homo sapiens
actgagggtggtggctatg

SEQ ID NO: 6059 - DNA, 19 bp, Homo sapiens
atagccaccaccctcagtc

SEQ ID NO: 6060 - DNA, 19 bp, Homo sapiens
gactgagggtggtggctat

SEQ ID NO: 6061 - DNA, 19 bp, Homo sapiens
tagccaccaccctcagtcc

SEQ ID NO: 6062 - DNA, 19 bp, Homo sapiens
ggactgagggtggtggcta

SEQ ID NO: 6063 - DNA, 19 bp, Homo sapiens
agccaccaccctcagtccc

SEQ ID NO: 6064 - DNA, 19 bp, Homo sapiens
gggactgagggtggtggct

SEQ ID NO: 6065 - DNA, 19 bp, Homo sapiens
gccaccaccctcagtccct

SEQ ID NO: 6066 - DNA, 19 bp, Homo sapiens
agggactgagggtggtggc

SEQ ID NO: 6067 - DNA, 19 bp, Homo sapiens
ccaccaccctcagtccctg

SEQ ID NO: 6068 - DNA, 19 bp, Homo sapiens
cagggactgagggtggtgg

SEQ ID NO: 6069 - DNA, 19 bp, Homo sapiens
caccaccctcagtccctgg

SEQ ID NO: 6070 - DNA, 19 bp, Homo sapiens
ccagggactgagggtggtg

SEQ ID NO: 6071 - DNA, 19 bp, Homo sapiens
accaccctcagtccctgga

SEQ ID NO: 6072 - DNA, 19 bp, Homo sapiens
tccagggactgagggtggt

SEQ ID NO: 6073 - DNA, 19 bp, Homo sapiens
ccaccctcagtccctggag

SEQ ID NO: 6074 - DNA, 19 bp, Homo sapiens
ctccagggactgagggtgg

SEQ ID NO: 6075 - DNA, 19 bp, Homo sapiens
caccctcagtccctggagc

SEQ ID NO: 6076 - DNA, 19 bp, Homo sapiens
gctccagggactgagggtg

SEQ ID NO: 6077 - DNA, 19 bp, Homo sapiens
accctcagtccctggagct

SEQ ID NO: 6078 - DNA, 19 bp, Homo sapiens
agctccagggactgagggt

SEQ ID NO: 6079 - DNA, 19 bp, Homo sapiens
ccctcagtccctggagctt

SEQ ID NO: 6080 - DNA, 19 bp, Homo sapiens
aagctccagggactgaggg

SEQ ID NO: 6081 - DNA, 19 bp, Homo sapiens
cctcagtccctggagcttc

SEQ ID NO: 6082 - DNA, 19 bp, Homo sapiens
gaagctccagggactgagg

SEQ ID NO: 6083 - DNA, 19 bp, Homo sapiens
ctcagtccctggagcttcc

SEQ ID NO: 6084 - DNA, 19 bp, Homo sapiens
ggaagctccagggactgag

SEQ ID NO: 6085 - DNA, 19 bp, Homo sapiens
tcagtccctggagcttcct

SEQ ID NO: 6086 - DNA, 19 bp, Homo sapiens
aggaagctccagggactga

SEQ ID NO: 6087 - DNA, 19 bp, Homo sapiens
cagtccctggagcttcctc

SEQ ID NO: 6088 - DNA, 19 bp, Homo sapiens
gaggaagctccagggactg

SEQ ID NO: 6089 - DNA, 19 bp, Homo sapiens
agtccctggagcttcctca

SEQ ID NO: 6090 - DNA, 19 bp, Homo sapiens
tgaggaagctccagggact

SEQ ID NO: 6091 - DNA, 19 bp, Homo sapiens
gtccctggagcttcctcat

SEQ ID NO: 6092 - DNA, 19 bp, Homo sapiens
atgaggaagctccagggac

SEQ ID NO: 6093 - DNA, 19 bp, Homo sapiens
tccctggagcttcctcatc

SEQ ID NO: 6094 - DNA, 19 bp, Homo sapiens
gatgaggaagctccaggga

SEQ ID NO: 6095 - DNA, 19 bp, Homo sapiens
ccctggagcttcctcatca

SEQ ID NO: 6096 - DNA, 19 bp, Homo sapiens
tgatgaggaagctccaggg

SEQ ID NO: 6097 - DNA, 19 bp, Homo sapiens
cctggagcttcctcatcat

SEQ ID NO: 6098 - DNA, 19 bp, Homo sapiens
atgatgaggaagctccagg

SEQ ID NO: 6099 - DNA, 19 bp, Homo sapiens
ctggagcttcctcatcatc

SEQ ID NO: 6100 - DNA, 19 bp, Homo sapiens
gatgatgaggaagctccag

SEQ ID NO: 6101 - DNA, 19 bp, Homo sapiens
tggagcttcctcatcatcc

SEQ ID NO: 6102 - DNA, 19 bp, Homo sapiens
ggatgatgaggaagctcca

SEQ ID NO: 6103 - DNA, 19 bp, Homo sapiens
ggagcttcctcatcatcct

SEQ ID NO: 6104 - DNA, 19 bp, Homo sapiens
aggatgatgaggaagctcc

SEQ ID NO: 6105 - DNA, 19 bp, Homo sapiens
gagcttcctcatcatcctc

SEQ ID NO: 6106 - DNA, 19 bp, Homo sapiens
gaggatgatgaggaagctc

SEQ ID NO: 6107 - DNA, 19 bp, Homo sapiens
agcttcctcatcatcctct

SEQ ID NO: 6108 - DNA, 19 bp, Homo sapiens
agaggatgatgaggaagct

SEQ ID NO: 6109 - DNA, 19 bp, Homo sapiens
gcttcctcatcatcctctg

SEQ ID NO: 6110 - DNA, 19 bp, Homo sapiens
cagaggatgatgaggaagc

SEQ ID NO: 6111 - DNA, 19 bp, Homo sapiens
cttcctcatcatcctctgc

SEQ ID NO: 6112 - DNA, 19 bp, Homo sapiens
gcagaggatgatgaggaag

SEQ ID NO: 6113 - DNA, 19 bp, Homo sapiens
ttcctcatcatcctctgct

SEQ ID NO: 6114 - DNA, 19 bp, Homo sapiens
agcagaggatgatgaggaa

SEQ ID NO: 6115 - DNA, 19 bp, Homo sapiens
tcctcatcatcctctgctt

SEQ ID NO: 6116 - DNA, 19 bp, Homo sapiens
aagcagaggatgatgagga

SEQ ID NO: 6117 - DNA, 19 bp, Homo sapiens
cctcatcatcctctgcttc

SEQ ID NO: 6118 - DNA, 19 bp, Homo sapiens
gaagcagaggatgatgagg

SEQ ID NO: 6119 - DNA, 19 bp, Homo sapiens
ctcatcatcctctgcttca

SEQ ID NO: 6120 - DNA, 19 bp, Homo sapiens
tgaagcagaggatgatgag

SEQ ID NO: 6121 - DNA, 19 bp, Homo sapiens
tcatcatcctctgcttcat

SEQ ID NO: 6122 - DNA, 19 bp, Homo sapiens
atgaagcagaggatgatga

SEQ ID NO: 6123 - DNA, 19 bp, Homo sapiens
catcatcctctgcttcatc

SEQ ID NO: 6124 - DNA, 19 bp, Homo sapiens
gatgaagcagaggatgatg

SEQ ID NO: 6125 - DNA, 19 bp, Homo sapiens
atcatcctctgcttcatcc

SEQ ID NO: 6126 - DNA, 19 bp, Homo sapiens
ggatgaagcagaggatgat

SEQ ID NO: 6127 - DNA, 19 bp, Homo sapiens
tcatcctctgcttcatcct

SEQ ID NO: 6128 - DNA, 19 bp, Homo sapiens
aggatgaagcagaggatga

SEQ ID NO: 6129 - DNA, 19 bp, Homo sapiens
catcctctgcttcatcctc

SEQ ID NO: 6130 - DNA, 19 bp, Homo sapiens
gaggatgaagcagaggatg

SEQ ID NO: 6131 - DNA, 19 bp, Homo sapiens
atcctctgcttcatcctcc

SEQ ID NO: 6132 - DNA, 19 bp, Homo sapiens
ggaggatgaagcagaggat

SEQ ID NO: 6133 - DNA, 19 bp, Homo sapiens
tcctctgcttcatcctccc

SEQ ID NO: 6134 - DNA, 19 bp, Homo sapiens
gggaggatgaagcagagga

SEQ ID NO: 6135 - DNA, 19 bp, Homo sapiens
cctctgcttcatcctccct

SEQ ID NO: 6136 - DNA, 19 bp, Homo sapiens
agggaggatgaagcagagg

SEQ ID NO: 6137 - DNA, 19 bp, Homo sapiens
ctctgcttcatcctccctg

SEQ ID NO: 6138 - DNA, 19 bp, Homo sapiens
cagggaggatgaagcagag

SEQ ID NO: 6139 - DNA, 19 bp, Homo sapiens
tctgcttcatcctccctgg

SEQ ID NO: 6140 - DNA, 19 bp, Homo sapiens
ccagggaggatgaagcaga

SEQ ID NO: 6141 - DNA, 19 bp, Homo sapiens
ctgcttcatcctccctggc

SEQ ID NO: 6142 - DNA, 19 bp, Homo sapiens
gccagggaggatgaagcag

SEQ ID NO: 6143 - DNA, 19 bp, Homo sapiens
tgcttcatcctccctggca

SEQ ID NO: 6144 - DNA, 19 bp, Homo sapiens
tgccagggaggatgaagca

SEQ ID NO: 6145 - DNA, 19 bp, Homo sapiens
gcttcatcctccctggcat

SEQ ID NO: 6146 - DNA, 19 bp, Homo sapiens
atgccagggaggatgaagc

SEQ ID NO: 6147 - DNA, 19 bp, Homo sapiens
cttcatcctccctggcatc

SEQ ID NO: 6148 - DNA, 19 bp, Homo sapiens
gatgccagggaggatgaag

SEQ ID NO: 6149 - DNA, 19 bp, Homo sapiens
ttcatcctccctggcatct

SEQ ID NO: 6150 - DNA, 19 bp, Homo sapiens
agatgccagggaggatgaa

SEQ ID NO: 6151 - DNA, 19 bp, Homo sapiens
tcatcctccctggcatctg

SEQ ID NO: 6152 - DNA, 19 bp, Homo sapiens
cagatgccagggaggatga

SEQ ID NO: 6153 - DNA, 52 bp, Homo sapiens
tcaattttatttgctaaatttagtacyagagtgacattatctgtacattctt

SEQ ID NO: 6154 - DNA, 52 bp, Homo sapiens
gggagaccatgaatcttcatgtgtagmtctttttggatcacttggtctagtg

SEQ ID NO: 6155 - DNA, 52 bp, Homo sapiens
caaggtcctgatgttcttagaactggktgtctgtatgtatttgcgttgtttc

SEQ ID NO: 6156 - DNA, 52 bp, Homo sapiens
aaactctccataataaatgcatgagtmtatgggtatataagctaaatctcat

SEQ ID NO: 6157 - DNA, 52 bp, Homo sapiens
ctgaaatactcacagtctgattccacygatagaaggagtaaattcttcatgg

SEQ ID NO: 6158 - DNA, 52 bp, Homo sapiens
tgctgcatgcagattctatctcaaaayaaaacactctgaagatgttccaaga

SEQ ID NO: 6159 - DNA, 52 bp, Homo sapiens
cgagctggggtcaagacatgggtgacrccagcgtcatatagaatagtcacta

SEQ ID NO: 6160 - DNA, 52 bp, Homo sapiens
ttaacagaaattggaggaagatggagycaaagataaggaacattgtctttat

SEQ ID NO: 6161 - DNA, 52 bp, Homo sapiens
ctaacccaggcgggacatagccaagtratgtgatgatgaggccgagctggtg

SEQ ID NO: 6162 - DNA, 52 bp, Homo sapiens
ttggggtctctctccctggaatctcaytgatggaaatttactggtcccttgg

SEQ ID NO: 6163 - DNA, 52 bp, Homo sapiens
cacaggtggctcagaggcaacagcccycacacctggctccctgtccctgccc

SEQ ID NO: 6164 - DNA, 52 bp, Homo sapiens
tggccacactagatacacattcctgcmtgacaagttctagtggacactgaaa

SEQ ID NO: 6165 - DNA, 52 bp, Homo sapiens
tgagctggaggtggaggccatgtcttrggatcagctctgggctccaggatgg

SEQ ID NO: 6166 - DNA, 52 bp, Homo sapiens
aattatggtgattctgctccatagcarcttcattaaaggacctagtctaagt

SEQ ID NO: 6167 - DNA, 52 bp, Homo sapiens
gtaaaaacacaatctaaatttactccrtgctcaagctcataaattatgatta

SEQ ID NO: 6168 - DNA, 52 bp, Homo sapiens
atctcgcagtttggctgaaacctgaaytaaatgcaatgcttttttgactttt

SEQ ID NO: 6169 - DNA, 52 bp, Homo sapiens
aaaatacaaacttcagagtgaaagaartctaagacttattatatgtgatgtg

SEQ ID NO: 6170 - DNA, 52 bp, Homo sapiens
gatttaatttcaggatgaggaatctcrgctgatattgggtttgcttaaatca
